United States Patent Application Publication US 2026/0191916 A1 - sequence listing, part 21

SEQ ID NO: 40 - DNA, 7086107 bp, Bacteroides cellulosilyticus (residues 1,771,528-3,543,054 of 7,086,107)
  source 1..7086107: mol_type = genomic DNA
atacaatacaggccatagatgcttcacgtattatttttagcgataccgatctttctgtatcggcttttaatgatccttcttattatactcccggaaagtttaaggaatatgcccgggaaaaacgtgataaacctatctttatgcgtgagtatgctcatgccatgggaaattcagtaggcaatttgcaggagtattgggatgtcattgaggctaatgaccacgtttcaggtgcggctatttgggattgggtcgatcagggaattgcaaagaagataaatccgggatataagaaaggagtggagaattcaggttctttgctattgaaggaaggtgaattctgggcttatggaggagatttcggtgattttcctaataatggggatttctgttttaatggtttaattggggctgaccgtgttcctcacccacactattatcaggttcagaaggtgtatcagaatattggtttttcacttgaagggccgaataaggtacgtctcaccaataagtatgaatttacggctttggatgagttcgattatgagtatgaatggttgcagaatggtgaacttgtaaagtcgggagaagtaccgcttgtagccggagatcatttggatattcccgctttcacgggatcgggtgagcttttcctgaatgtatttgccaagctgaaacagagtacatgctgggctgaaaaaggctttgttattagtaaggagcaatttttggtgaatatggccaaaccggagtctattgcctcggaagggggaagtgttgaagtgaatgcgtcaccggttgctattgagataatggctggattgaattgtttcattgtagatgtgaaatccggtgctttgacaagttggaaaaatgatggaacggaaattctatatgctcctttggaaccttatttctggaaaccggcgaacagtaatcagatgaataatggttataataaccgtttaggaatatggaaaaacgctgctggtgaacgtgtagtcgaaggtgtggattattctgtgaagaatgggctggctgtagtggaggttagtatgtcgttgcctgtggtaggtgccgcttatcaattgcgctatactgtaaatgggagcggaaagatacaagttgaagctttctataaaccggaaaaagaaaagattccattaatgcctaagtttggaatgaggatgcgtttaccttctttcatggattatgtcaaatggtatggtcgtggtgaatttgagaactatccggataggaaaacggctgctttagtcggttgctatgcaacggatctcaatagttttgtcacggattatgcttttccacaggataatgcaaacagatgtgatgtccgttggttttcactgaatgataaggagggccgaacgataaaagtgacaggtttgcaaccgctctgctttcgtgtgtggccgtatggtgaggaagatttggaaaagaacaggcatgcttatgaactacccgtacgcgattatgtgaatgtgaatattgatttgaatattcatggcgtaggaggtgctgattcttggggggcaagaacattggatgaatatacaattgatggcaatcaagcttattattatggttatttgatggagtattctgattgatagccatttatttatctaatattgaaagtcaaatatctaatattgaaaaaggtgtaaaagatatgcagctatttttgtatcgtgcaaagttatggaatgcgagttttaatcattaaatgtaataagtaccatgaaaccaattaaaagtgtatttatattaatggcgctgtgttgttgtatcccgcttacagggcaagattatcagcaaattcctgagggaattaaggcgaccattaattctgtagatgtagaattacaattctatactccgtcaattgtaagaatactaaaatctcctaatgggtggaagtatacaaaggagagtctttctgtaatagaaactcctcagaaggtgaagactgccgttactcaggaaggcaatattgtaagcctgaaaagtagtgaaatgggggttgctcttaatttggaatctggtgttgtgtctttctttaatgcgaaaggagagtcgttgctcagtgaaaatggaaagccggagtttaccgattttaatgatgcaggcacaaaaacgttcactgttaagcaaacgtttcttttagataaggatgagcctctttatgggttgggcattctccagaatggaaagatgtcgcaacgtaatcagactaaacgtcttgtacagggcaatgtggaagacgtggttccatttgtgcagtccgtgaaaggatacggtcttttctgggataactattcaccaaccaattttgccgataaaccggaaggaacctctttccagtctgaagtgggagattgcatcgactattatttcatgtatggtggagatgccgatggcgtagttgcacagatgcgtgcactgaccggacaggtgcccatgttccccctctggacttacggttatttccaaagtaaggaacgctataagagccaagaagagacggtgggagtggtacggaaataccgtgaattaggtgtgccccttgatggaatcattcaggattggcaatactggggacacaactatttgtggaatgctatggactttaagaacccttcgttcagcgatcctaaaaagatgattgatgatgtgcatggaatgaatgcgcatatgctgatttctatctggtcttcgtttggaccgatgaccaagccttacagggaattagacaagaatggtatgctgtttaacttttctacatggccccagtcgggacttgatacttggccgcccaatatggaatatccttccggagtacgcgtatacgatgcctataatccgaaagcccgtgatatctattggaaatatctgaatgaaggtatcttcaagttgggtatggacggctggtggatggattctacggaacctgaccatttcgattggaagccggaggattttgatacgaagacctatctggggtcgttccgcaaggtgcgtaatgcttatccgttgttgacggtaggtggcgtttatgataatcagcgtgccgtaacttcagataaacgcgtctttattcttacacgttctgtttttgccggacagcaacgttacggagccaatgtatggtcgggagatatcggttcttcttgggaatcactgcgcaatcagattccggcaggcttgaattttactcttaccggaaatcctaacttcaattcagatattggtggcttctttgccggaaactataataagagttggaatgacggaagtgcccccaagaatccgatgtatcaggaactgtatgtgcgttggctgcaattcggtacgtttacgccgatgatgcgttcacatggggctgatacaccgagggagatttatcaattcgggaaaaaaggcgaatcaatatatgatgctattgaaaaaatgattcatctgcgctatgcattgttgccctacatctattccacttcatgggaagtgaccgagcgacagtcgagctttatgcgtgcgttggtgatggactttgctgctgacaagaaagtatgggatataaaagaccagtatatgttcggtaaatccattttggtagcaccgatagttaatgcgcaatatactcaggagaagctggtaaaactaaaagaaaatgatggttgggataagaataacgttcagaagtttgagaataaagctccggtagactttatgcaggctaagtctgcaaaggtatatttgccggcgggtgctacctggtatgatttctggacgaatgagaagtatgacggtggacaagaaatagaaaaggaaacgactattgatgtcattcctttgtatgtcaaagctggtagtattattccaatgggacctaaagtgcagtatgcaacggagaaaccgtgggataatcttgaattgagagtatatgccggtaccaatggttcctttgttctttatgaggatgaatttgataattataattatgagcagggagcatatacagagattcctatcgtatggaatgatgcatcacgccagttgatcataggggctcgaaaaggtgcatacaagggaatgttaaataatagaaagttcacaatcgtacttcaagacggaactcggaaagttgttgactacaaagggaaaagagttagtgtgaaattctagtgttatttggaaatatagattttaaagactaagagtatcatgaaaaagatgatgttagcatggctgactgttgcttcattactgatggggtgttccggttcggaaacgtcggtgaaggggacgtatcgtaatcctgtaatttatgctgatgtaccggatatgtctgttacgcgtgcaggagagtactattatatgataagtaccactatgcatttaatgcccggtggacctgttatgagatcaaaagacttggtgaattgggaaacagtgagctatgtcttcgataagctgactgataactcaaagtatgacttgattggtggaactgtttatggacgcggacaatgggcatcttccatacgttatcataatgggaaattctatgtattgttctcgccaaacgatgtaccctatcggtcgtatatattcacggcggaagatccggcagggaagtgggaactattatcaagaacacagcattttcatgatgcctctttgttttttgatgatgacggccgagtatatgtattctatggaaccggtgagctgaaggagttgaagagtgacttgtcggatgtgaaacccgatggagtcagtatgaagatttttgaacgggatgctgatgaacagggcttgctggaaggaagccaggttgtgaaacataacggaaagtattatttgctgatgatttccatggattggagtatccccggccgggtacgcagggaagtatgttatcgtgcagacaagataacagggccttatgagaagaaggttatcctggagcatgattttgatggttatggaggagtaggtcaaggttgtattattgactcggaagaaggagactggtatggggttatttttcaagaccgcggaggaataggccgtgtacctactcttatgccctgccgttgggtagacggatggccgatgctgggagatgaaaatgggcatgtgcctttaacgatggaaaaagagatatatccgactgaaaataccaaaggaatacttggaagtgatgatttcaacggagagaaactttcactctattggcaatggaatcacaacccggtggatgataagtggtcgctcacagaacggccgggatatttacgtttagaaaccagccgggtggttgataatctgtatcttgctccgaatacaattacgcagcgtatggagggaccgaaatgtaaggctactgtctcgcttgatatttcgaatatgaaggatggtgatgtggcaggttttagtgcattcaatggacattccggacttttgtctgtggtgaaggagggagatgcaaaacgacttgtaatgtctaccaatgtagtcaactttgataatactccaaataaagctatcgcaagtgtggatgtagaggaaaaggaacaagtagaacttaatcagaatatcatttatttgcgtatagaaggtgattttactccgaagcgggatattgctactttctattacagcctggacaataaggaatggaagaagattggaacggatttcaaaatgcgttttgattatacaaaactgtttatgggaagtaagtttgccatctttaactatgcaacaaaatcgttgggaggttatgtcgacgttgattactttgactacgagagggctaatgatagggtgactattaataaataatatcttgatattcatgaaatattttttagttataacggcattattgatttgcttcacaataaaagcggaggaaaaacagatagcaagtccggatgggaaaatagtagtaaccatctctgataagaatggacaaccttcctatcgcatcagttataaggatactccttttatcaattcttcttctttgggacttattacgaatataggtgatttttcccgggaaatgtctttggaacacgatgttcagtcaagcagaattgacgagacttatacattgcccaatataaagcagagtaatgtgcactatgtagccacagagggtgtataccggtttagtcaggaaggcaagatgatttacgatgttatatttcgtgtaagtgaccgggatgttgctttcaagtataaaatgtatcctcaaaagaatactttatcctgcattgtgaaagaggaggcgacaagttttgtgcttcctgatgggagtacgacttttttgtgtccgcaaagcaaacctatgggaggatttgcccgtacttctcccagttatgagacgccgtataaagcagatgatgctatgggcaaaaatggatggggtgaaggttatactttcccttgtctgttccgtaatggtgataaaggatggatacttatttcggaaacaggtgtagatagtaaatattgtggaagtcgcttactgggacgtgaaaatggcttgtatacaatcggttttcctcaggaaggtgaaatgaatggaaatggtacaactgcacctggacttgccctgccgggagaaacgccttggagaacgatcactttgggtgaaactttggctccgattgttgaaacgacagtttcctttgatgttgtaaagccactgtatgaagtatccggaaaatatgaatacggcagaggttcctggagctggattattggtatggatggaagtacgaagtatgaagagcaattacgttatattgatttctctgcggcaatgggataccagtctgtattggtagatgcattgtgggatacgcaaataggctatgacaaagttgaaaagctggctaagtatggtgcggaaaaaggagtggggctttatctgtggtataattctaatggatattggaatgatgccccacaatcaccgcgtggtatcatggacaatgcgatagcccgacgcaaggagatgaaatggatgcaaagcattggaatacgtggtataaaggttgacttctttggtggtgataagcaagtcaccatgcagctgtatgaagatattcttgctgatgccaatgaatatgggttactggtgattttccacgggtgtactttgcctcgcggttgggaacgtatgtatcctaactttgcgtcgagtgaagctgtattggccagtgagaacctgcatttctctcagggaagttgtgacaatgaagctttcaatgcctgtctgcatccatttattcgtaatacggtgggtagcatggactttggcggcagtgcactgaataaatattataatgcggataatgctccacgcggaaaccggcgtatgacttctgatgtgtttgctttagctactgcagtattgttccaaagtccggtacaacattttgccttggctccgaacaatctgacagatgctccggaatgggcgataggcttcatgaaagaagtccccactacgtgggatgaagtacgctttattgatggctatcccggtaaatatgtagttatggcacgcaggcatggagataaatggtatgttgcaggagttaatgcgcagaaagagaccgtaaagttgaagattgctttaacgatgtttatgcctggtgatcaagtgagggtatttactgataatgaagaattgcaaggaaatgtaaaacagataaaggtaaataagaaacaggagttacaattggcaattccttgcaatggtggaatattaattgtagaataatcaaactaaaaaagcaatatggataaaatgaaatctttattcctttcatcgctattggtggtggtgagtacttcgggattggcacaaaatccaatcattcagacaaattatacggctgatccggccccaatggtatataatgataaagtatatctttatactacccatgatgaggataattctacttggtttacgatgaacgactggcgcttgtatacgaccagtgatatggtgaactggacggatcatggcgctgtgttatcatatactgattttagttgggcaaaaggggatgcatgggctccacaatgcattgagagagatggtaagttttatatgtacgtacccatgatttcgaatataaacaacagaggtgcaatcggtgtggcggtagctgacagtccttacgggcccttttatgatccgcttgggaaaccactggtccagagtgaatggggagacattgatccgactgtttttattgatgatgacggacaggcttatttgtattggggaaaccccaacctgtattatgtgaagttgaatgaagatatgatttcttatagtggggatattgtacgtgtacctttggtagcggaatcgtttggtaaacgcgaaggcgatgctcagagagccactctgtatgaagaaggtccctggctttataagcgggataagaagtattatttattctggccgggaggtccgctgcctgagcatatcggatactcaaccagcgatactcctacaggtccgtggaaatacggtggagtagtgatgcctgccggtggcggagcgtttaccattcacccgggagttattgatttcaagggtaaaacttactttttctatcataacggacagttgcccggaggtggtggattcaaccgttcggtatgtgtggaagagcttaaattcaacaaagacggatctattcctcaactgaagatgacagagggcattacaaaagggattacgacactgaatccgtatgtaaaaacggaagcggagactattgctttttctgaagggttcaagtctttcaaaaatgatcaggtgggtgtttttgttacggcaatgaagaatggcagttatacttgtgttcgcggtgtagatttcaaggcaaccggtgcaacgaagttcagtgccagaataggaactacacataatgatcccgtaaatctggaaatccgtctggatggtgttgatgggcaactgatagggacaatgaaggtaccgcgtacaggaggaagtgatcgttgggacttacggactattgacattacaaaagtgacaggagtacatgatttgtattttgtagtaaaggggcgccctgctaccaatcttatgtattttgattattggatgttttctaaataacttgtactaaatactatgaggaataaaaggaagtatatcagaacaacaggaatcatcctgttgttctgtgttgctttgttgaatacggcatgtgtttcaaagcaaaaagagaaagtcgttcttgaactgaaacagggattactttcgctgataccattaaatcagaatgctgttcgggtacagttttcccaaccgggttcggcgcctatggaagagcttatctatacagaaaaacttcctgttcctgaatatgaagttacagaagataagcaatcgctggttttatctctggatggaatttcagtggaattcgacaaaggtacggaagtcttgacttttaaagatgcgaataagcgtatcattcttcaagagaaagttggcggacgttttatgaaggtttcttctgtacagaatgaacctacctatcaagtggaacagcgttttgtttctccgaaagatgaatacatatatggtacagggcagtttcaggatggttatctaaatatccgggggttgacacggcgcttgacgcaggtgaatacacagatttctattccttttattctttcaagtaaaggctatgggttgctgtggaacaactatggattgacggatttcaatccggcagatcaatttgtggagttgactcccgccaatgcaagtggagaggctgttacggtaaataccaccggtacgagtggaaatgtaagggaaaccagacaaacctattcgtttacagcttcggtggatgtacctcgctccggtagttattctttgttgctggatgtgggacagcgaatggcacggaaatattatctggttattgacggacaaaagattgtggatgtcaataatttatggttacctcccactacttctgccattgtggaactgacagccggtaagcacgatatagaagtacaaggtgaacgtaatgataagcctgtgttatattggcgttctgtttcagaagagactgtattccgttcttcggttgcccaaatgttagattatacggttttcgccggtaacggagatgaagtgatcgccagctatcgggaactgaccggacctgcccccatgatgcctttgtggagtctgggatatatacattgtcgggagcgttataatactcaagcagaattgctggagaatgcccgtgaattcagggaacggaaattgcctatcgatatgattgtacaggactggcaatattggggaaaatatggctggaatgccatgaagtttgatgaagacagatatcctgatccgggaagtatgatgaaggaacttcatgagatggatgtgcgtctgatgatctctgtatggtctaaaatcgatgctcagtccgaagtgggaaaacaagccaaggaaaagggatattacataccgggcagtgactggattgactttttcaatccggacgcggcggctttctattggcagaatttccgtaccggattattgaaatatggtattgatgcttggtggcaggatgctactgaaccggagaatgatgatttgcagaaccgtcgcattaatcgtgaacaaactccgggagaggtgtaccggaatgtatatccgatgtatgtcagcaagacaatctatgaaggtttacgtcaagatgatcctgacaggcgagctatgatttttactcgcagtggattttcaggaatgcaacgttatgcagccgccacatggtcgggagacgtaggacatgactgggaaaccttacgtcggcaaatcgtagggggattggggcagatggcgacaggactgccttggtggacttatgatgcaggtgggttcttccgtccgggcgaccagtatacaaataccggataccatgaacagttgatccgctggatacaggcaggaacatttttcccgctgatgcgtgtgcatggttatatgagtaataccgagccgtggcgatatggagaaaaggtggaacatatcattgcccgatatctggatttacgttataggcttcttccttatatctattcacaaaatgctgcggtttcattcaatggttctactttgatgcgtccgttggtgatggatttccctgaagaccgttttgcactggaacaaaactatcagttcatgttcggaccttctatattggtggctccggtggtagaaagcggtgttaaccgaatgaaggtttatcttccggaatgttcggccggctgggtagatttctggaatggtacacctcataagggaggtatattcacagatgtaaatgtggatcttatgaagactcctttatttgtgaaagcgggttctatattgccgttgggacctcagaagcaatatgcatcggaggagacggaacaaccgtgggaaatccgtatttatccgggagctgatggttcttattctgtttatgaagacgaaggaatcaattacaattatgagaaaggtcagttctgcacgtttgatctgaagtggaatgattcggataagacccttactatcagtgacagaaaaggttcgtttgcaggaatgaaggaaagaatggactttaatattgtaattgtaacgccggagtcaggtactggaatttatcagtcaaaagtgaataagagcattgtctatgagggaaaatcaatggtgatatcactgtagtgttttttgaggcaatgatttggaaatatcttaaaatatgaagaataatatgaagcagtttttgaccctcgtagggtttgtaatagcgtccattactacaggatgtggtcaatcccatactgtgtggcttgatgatttggatctgacagctatgactcaaggtaatggagtagctatgaaaaataaatcggttgacggtaaaaccttgacaatcggaggacaaacgtttgaacgtggagtaggtacccattcagtcagtgagatagcaattcaattggatggcaaagccgtatcatttacggctcaggtagggctggatgatgagatcatcgagcataaaacgtctgccgaatttattgtaataggagatggagccaggctttggtccagtgggattgtaaaggcaggagatgcgcctaaattatgttcggtttcattggatggagtcaaaaggcttgagctgatagttgctgatggtggtgacgggccttactatgaccatgccgactgggcggatgcaaagataatatcaaaaggaaagaagagttttcctacacttaaatttattgctacggaaccttatatactgactccacccgctcccgcgacgccgagaattaatggggcctctgtgtttggagtgcgtcccggttcgccattccaatatcagatagcggctacaggagatcgtccgatgagatttgcagcggagggattaccggcaggattggagattcacccggaaacgggtctgattacgggtaagctaaccaaggctggtacatttgaagtggttttacaggcgaaaaatgtgaaaggaacggcagaaagaaaacttcgtattgagtgtggtgacagaattgctcttactccgccgatgggatggaacagttggaactgcttcggacacgaagtctcggctgagaaagtgaaacaagcggcaagagctatgattgaaagtggtttagtgaattatggctggacttatatcaatatagatgattcatggcaacatcacagagatcccaacgaccggaccagaggtggacggttgcgtgacgatcagggtaatattatacctaatgcccaattccctgatatgaaagggttaacggactacatacattcacttggactgaaagtgggtatttattcttcacccggtccgtggacttgcggaggttgcgtaggcagttatggttatgaaaagcaagatgccgatatgtatggtgaatgggggcttgattatttgaaatatgactggtgcagttacgggggagtacttgaccgtgatttggataaggatccttacagcgtgtcttccttggcgtttcaagggggaggggattcaattgccggtagaaagccatttaagattatgggggattatttgcgtcagcagcccagggacattgtttataacctgtgtcagtatggcatgggggatgtctggaaatggggagatgccgttggaggccagtgctggcgtacgactaacgatatcactgatacttgggaaagtgtaaaaggcatcgctctttctcaggaccgtgcagctgcatgggcgaaacccggtaactggaatgatccggacatgctggttctaggtattgtaggttggggaaatcctcaccaaaccaagcttaaacctgatgaacagtatctccatttcagtctttggagcttattctctgcaccgcttctgataggttgtgacttggagaaaatggatgattttaccctgagcctgctgactaacaatgaggtgatagctgttaatcaggatcctttgggtaaacaagctacatgtgtatattcaataggggaattacgtatttatgtgaaagaactagaagatggcagtaaggcggttggtttctgtaatttcgaccgggaaaaggctgatatctctttccgtgattttgataaactgaatattacgggtaaacaaactgtgcgtgacctttggagacaaaaggatataaaaaccttggatacaggacggaagccattgtcacttaatgttccggcccatggtgtacttctttataaatttacaccggttcaatgaaatgtaaaaaaatagaattacttacttaattgtttttatcatgagaaacactctttttattgctagtttatatctgatcttatccgcttgcggcgagaaaagtaatgaagtgaagtttatttcggaaagtaatccgatagtgacggataagtttaccgctgatccggcacctatggtgcataatggtagactgtacctctatgtgggtcacgatgaggctgaagaaggacaggactttaacataaccgaatggctgtgttattcaacaaaagatatgaaaacatggaccgatcatggaagtgtgctgaagcctaccgatttctcgtggggagttggagaagcatgggcttctcaggttatagagaaagatggaaagttctattattatacaacggtacaagcaggcgctccatataatagtaaaacggtgggtgttgcagtgtcggacagtccgacaggccctttcatcgatgctcggggtacaccgcttattacagatgatatgactcctaacggtcctcgtggatggtggaacgatatcgatccgaccgtttttgtggatgatgacggcacaccatggatgagttggggtaacggtacctgcttcttagtgaaacttaaacccaatatgacagaactggacggaaacatagagattcttaaaatgccgaaatttgtggaagggccatggattcataagcgtgaaaatctttactatctgacgtatgcatcgatgggtaaggggcgtgaaaccattagttatgccacggcaccaagtatggaaggtccatggacctatcgtggagtcttgacaggaatggcagaaaatagttttaccatacatccgggaatcattgaattcaagggacaaaactatctgttctatcataatgcaatacttaccatagatggtaaatccggtgccacagggcgccgaagcgtgtgcgttgactatctttattatctacccgacggacgtatggcgtatgttgagcaaaccaaagaaggtattactgtgaagccgaagactgctgccgaagtagctgagattgtaaatccatacactgatgaaaaagaagttgtggtagaaaaagaagtaatagcggattgaatgtaaattgagcaagtaatattatatatcatgaacaagagaataactttatttctcattacccttttaacggtttgtggggtacaatcgcagaacaataatcaaaatcggaacgctgatttccataaatgggcagaaacaccacctatgggttggaatagttgggattgctttggggctaatgttactgaggcggaagtgaaagccaatgccgattatatggcggagcacctgaaagactacggctgggagtatattgttgtggatatccgctggtttgtggaaaaccagactaccggttactataacttcaaagatcctaaatatgtgctcgatgaatacggccgctatatgcctgccgtgaaccgttttccatcagctggcaacggaaatggatttaagcctcttgctgactatgtccacagtaagggattgaagtttggtatccatctgatgcgcggtgtacccacacttgccgtagagaagaaattgccggtgaaagatgccggtggagtaacggctgccgatatttattctaccgactggaaatgcccctggttgggagataactacacgattgtagccgacagaccgggagcgcaggaatattataattcaatcttcgatctgtatgcttcatggggagtggattttgttaagattgatgatctttcccgcccttatcatcaggcggaaatagagatgatacgtaaggcgattgaccgtaccggacggccgattgtattgagcatgtcaccgggagaaaccgatgtgaataaggcggatcacgctgtagggcatgctaatatgtggcgtacggtagatgatttctgggacaattggccgcatctttaccatcagtttgaagtatgtcccaaatgggcgccttatataggtcgtggcgcatggcccgatgccgatatgttgccgttggggcatattgatcttcgaggtaacgcccgtatgagtaagtttacgcgggatgaacaatatatggttatgacgttgtttgctatgttcaagtcgccgctgatgttcggtgggcacttacctgataatgataaattcaccaattcgctgataacgaatgaagaagtgctctatgtacatcggaactctgtaaacaacaagcaatggtataataaagatggcgttatagcctggacagctgatgatcccagaaatggagataaatatctggcactgttctatgtagatcagaaagaaccctgggagtcacatcctgccaatcggaaagtgactgtagatctgaaagaattaggatttggcggagctgccaaagtacgtgatatctggaggaatcaggatcttggcaatttctcaggaacggagttctcacctgtcatcaattatcacggcgcagggttgtacaggatctcgaaaaagttgaaagtacagactaacaatccgattattcagactaaatatacagccgatccggcaccaatggtgcacaatgatactgtattcctttattcaagtcacgacgatgacaatgcgaaaggctttgttatgcgcgaatggttactttatacttcgactgatatggtgaattggacagatcacggagtggttgcctcgctgaaagacttcaaatgggttccttatgacaatggtgcctgggcaccgcagtgtattgaacgcaacgggaaattctatatgtattgtccgatgcccggtgggataggcatcggtgtgctggttgccgatagtccttatgggccgtttatagatcccatcggaaagccattagtgaaaaacagttatgctgatatagatcctacggtgctgattgatgatgatgggcaggcttatatgtattggggaaatccggatttatattatgtgaagttgaatgaagatatgatttcctgtgatggtgaagtagtgcatgagcagatgacacatgaggcttttggcgaacggaaggggaatcagaaacgccccactttatatgaagaagggccgtgggcttacaagagaaagaataagtattacatggcgttcgcgtccacctgctgtcccgaaggcatgggatattcgatgagtgactctccaactggtccctgggtatataaaggtatgattatggaaggtgacagaagatcaaatggcaatcatccgggtattatcgactataaagggaatacgtatgtctttggcttcaattatgatatccatttttccaagatttcccagcactatgagcgacgctctatttgtgtggagaaactgacctttaatccggatggcacaattcagcaacttccgttctggacggcaaaaggcgtagatccggtgggtaagctggatccttaccgtcgcattgaagctgagacaatagcttggagtgagggcttgaagacagaaaagagcgaggcaggtatgtatgttacggctattcacgacggggattatattcgtgtgcgcaatgtcgatttcaagaaaggggcgaagtcatttgaagcagttgctgcatcgtcttcttccggtgggcaaatagaaattcgtttggatgacaaagaaggtacgctgatcggcacctgcgttattggcaatacaggtggtccggaaagttggaagactttccaggctcaggttgataaagtaaaaggcgtgcacgatgtttacttcatctttagaggcggcgaagatgagctatttaacttcgactgttggaagtttatcagatagcggacagttaaggctttagttcattattgcttgaataggttgtatcggaaatagatattatctatgtctgcatagataaatccgatgaataaaaagtgtgtaaatatcaaacaaaacccttacttttgtgttgttaataagagtgactaacgacaattgatacgtaatttactaactaaataagaaaaagaactatggctaaaagtgttaagggaactcagacagaaaagaatctgctgacctcatttgcaggagaatcacaagcaagaatgcgttacacttattttgcaagtgtagctaagaaggaaggttacgaacaaattgctgctatctttactgaaacggctgatcaggagaaagaacacgctaaacgtatgttcaagtatctggaaggtggtatggtagaaattacagcaagctatcctgccggtgttatcagcaccacactggataacctgaaagaagctgctgccggtgaacacgaagaatggtctttggactatccccactttgctgacgtagcggaaaaagaaggtttctatgaaatcgctgctatgtaccgcaacatttcaattgccgagaagggtcatgaagaaagatacctggctttcgtaaacaatatcgagaatgctacagtattcgctaaagaaggtgaagtagtatggcaatgccgtaattgcggtttcatcttcacaggtaaagaagctcctgaagtttgcccggcatgtttgcatccgcaggcttatttcgaagtgaaaaaagaaaactattaagaaattcttatttctatgataaagaacgcccgggtgtttcgcttgaagaaacatccgggcgttcggcattaataaaggagataactccttaacccgttggcggaattactttctttctggcgggttatgaattaattcaccacagattacacagattgacacagattctattttactgattattagattaataaatctgtgtgaatctgtgtaatctgtggtgagtcttattcattcctttcccgggatgaattaattccgccaacgggggtgtccttatcctatttttttgcgtgcggataatcaatcgtatagtgtaatccccggctttccttgcgttctatagcctggcgggtaatcagatatccgacattgaccatgttgcgcagttcgcaaattgccctggatgccttgctacgtttaaagaggtcttccgtttcctcatatatcatatccaaacgtacccaggcacgtttcagacgcaagtcgcttcgtacgatacctacataggctcccataatttggttcacttctttcatgctctgagtaataagcaccatctcttcgttggtcacagttccttcggcattccattccggtatttcgtggttgaactcatagcggtcgagtacgcttagcgcatgtttggcggcagcatcggcatagacaaccgcttcaatcaaagagttggaagctagacggttgcctccgtgaagacctgtgcaagaacattctcctacagcatacaggcgattgatggaagattctccgtttaggtttaccttgatgccaccacagaggtagtgtgcggcaggagctaccgggatatagtctttggtgatatcgatacctaagctgaggcacttttcgtagatattcgggaaatgcttcttggtttcttccggatctttgtgcgtgacgtccagatatacatggtcgtcaccgcgttgcttcatttcgctgtcgatggcacgtgccacgatatcacgcggagcaagagaaagacgcggatcatatttctgcataaactcttcaccacccatattgcgtaatacggcaccatatccgcgcatcgcttccgtaatcaggaaacagggacggtcgcccggatgataaagtgctgtggggtggaactggatgaactccatatcctgtacgaaacctttggcacggtagaccatggcaataccgtctccggtagcaaccagcggattggtggtgttgcggtaaacagcacctacacctcccgtagccatcagcgtcactttggaaaggaaagtatccacttcgcccgtgtcttcattcagcacatacgctccgtagcacttgatgcccggggtatggcgggttacgatgatacccatatgatgctgcgtgatgatttctacggcaaaatggcggttgaatatttcgatattggggtgcgtctttacggctctgataaggctttcctgtatttcggcacctgtattgtctttgtggtgcagaatgcggaattcggagtgaccgccttctttatggaggtcgaagtctcccttatcgttcttgtcgaagtccactccccagtctatcagttctttgatttgtccgggggcctcgcgcaccactttctccacggcggcgcggtcactgatccagtcgcctgcaatcatggtgtcttcaatgtgcttgtcgaagttatctaccagtgtattggttactgaggcaattcccccttgggcgaagaaggtattggcttcttccagttccgttttgcagatgagtgctaccttacctttatgagccactttcagagcgaaactcatgccggctataccggaaccaattactaaaaagtcgaactctttaatcatatttcgtatgtttaagtactgcaaagctacaaaataactgggttgcttgtacttttcctgtatattaattcacgattttatgataagtactgctttataacctcatccagcgactcctcttttgtaagctttattttcttacgcatacgcgaacggatcatgttgacgctactccggttgatgcccattatcaaggctatttcgtccgtactttgattcatgcagatgagcatggccagtaactcctcgttgcgggtgagttgtggatatttctcccgcaacttaggcaagtaaagcggatatatggcggcaaatgattttctgaaggtgttttcgtcttctttactgagcagactttgtccggtcagttggctgacggtgctcagattgttggcggccattgcctgctctatctgtccggccaatagttcgttgtgccggttcagttcttgctgacgggccattaacttttgtatttcctgtttacgcttttccaataacaggcggttcgccttcctcttagtgataaaataggcaatggaaatgataagtaacaacaacagtgcaatggagatgtatatattgaagaacaactgatgttgttgcagctctacttgtgcggaaagcaacttgttctccttctctttacgctcggcatcaaaccggatattggcggcggcaacggcacgtatcttttcatccagattcagggagtcagcgaagagctggtctcggtcgtagcaacggaagaaggcatcgtccattctcatcctccggtagtagtccatcagtatccggttggcattcttctcttttccgatcatgtccatccgggcaaatccacgggctgccttttctataagaggtattccttgtgaggccttacctgtcttcagtagagcacgtcctaaatgaaggttcaggtcatgcctggcccattgaggcatgcgggtactgtccggacaaatgcttactgcaagctgtaatgccttttgtacagagtccggatagtccagatagctatctactgtgaggactttgttgacaaacacacctttaaagctttcctgttcggctgaagttttcccggcccggtccagatagtagaatacggaatctttatcctgggttctgcggaatatttctgcgcgatagcgatagagatcacccagcccgaagctgtctttcaggagtgaatagtattgggctttggaattcagctctaaggcacggtcgtacatgcccagttcggcatagaggttggcctgttcgccataggctatcactatattaggaggggctatgctgtcattatagctgttgatagcttcctgattagtggctaccgctttttcgtattcaccgatcaggcggtaatagatgcccagtcgagatatgatgcggagcatattgtggaatttccctccctgatggtaacattccatcgctttctccaggagtcggatagcttggggaatatcgttaccggaatagatataaactccgctgacaatttcggcctgcggaatgtaacggtcggcatcatcgtattcgggtaattgcaagtattcgtctgctagccggatggctgcctcgttgtctccgcacatctggtgcaagcttgcccgggtggataacaattcgtgtttgcaatgttgttgcagaaagggagcgttgttgaggctgtccagatattctatgccgggacgaaattgcttgctgcccagatagctgaaatagaagaagttgaccatctgccgggcatatttgaccactgtatctttaggctcggtatgatctgctacggccagcaattcggatatcttttgtttgccttcgtcaatggctgcctgatgctttctctctttcaataatgtgttcagttgttggatagtctgctgccattgctgtgtgtcctgattacttgaagaatgtgggggtacggtacaggctccggctgacagcatgaggagtaacataagtgtttttatcttcataagttggaggtttatttggtttgccggacaaagatacaattccattttaaaaaagaaataagtgctatctctatttttttatgttttattgaacttgataatgagagagatacatttttgtatattggattgtacattggttatttatggtttaatcttatagtttctgcaaatttgcagtctatagaagactaaccaaataataaattaaggtggaaaagatgtcacgattgtgtatgaaagaaatcagtagggctttgatagagatgatttccgatgaatcgccctatgcttcgaaggatatgctttgcggagcgcgtggagccgttttccgcgagatatttatttttcattatccagactttatagagaaggtgcagaagttggttcccggtgctacgaaagatgaggaattgctctgtatgctgattgccgttgggcagtcggtagatgagattgagcaactgttttgtttgccggccgagcaggtgtatatgttccgtaagtcggtatgctggaagatgagattggaggaagaaaagctgctgggtgataaattgcgggagatattggaaggataactcctgctgttccgcaaaaatacctatcttagcggcaaaaacagaacaaaatgaatcgtatcttccatgcccgcattgctatagggcaatatttgtttttagtgctgacaacgattatcgttatttatgccatgtggatgcagcatgccgtcatggccgtccttttcatgctcctgctcgtcatcgccatcgagcgactcattcatactacgtatacgctgaccacagacgacaggctcctccttttttacggacgcttttcccgttcggaggaaatatccctgaaagacattatctctgtggagcgggcctcgtccatgaaaataggacgtttcgccgtgatgcgctatgtgctggtgaagtacggaacgagggggaaatgtgccgtgctgcttccggtgaaggaagatatgttcataaaaacccttacgaatcgtttaaatgaagtgaagaaatactaattctctattcccctgttgcagccttcccgagagtcgtccgtctaatttctaaaaataagagaaatgatgatgaatttgacttgtgctattttgcatgccgacagacaggtgagtgaacaactagaagcgttcatagccaagacaccctttcttgctttgtgtggaaagtacagtaatcctattgaggctttgaagggttattatgataataaggtacacctttactttgtaggaatcgggcaggaagaaacggagggcatcaacgggatggaattcagtaagctactctctccgtccacccgtgtcatatttattgcggatactccccggtatgccgccgagtgctttcggctggacgcattggactatctgatatccgaagtcagttttccggtttttttcgaagcggtgaataaggcttcgcgttggttcagcctgaaaggtgaaacgggaatgccgcttaccgttcttcccgaaaagtctcagacggaaacttgccaaccggaaacgctcaaggtgatttatgtgaagtccgacaatcggattttccgcttggatatatcccggatatcctatatcgaaggattgggtgattatgtgaagatttatagcaaggacgagccaaagcctgtgctgagcttgtgcacgatgaagtatatggaagagaaactgccttccgatgagttcatacgcgtccaccgttcgtttattatacgcaaagactgcatacgcatcatagaaagcagcaagattgctttggacaagagaagtattcctatcggagaggtttaccggaagaagctgaagaattatattgctgattattctgttctttaacctgttgcgatgcttgtttccggaattagctcacatcggtacagaggtggggtatcttctcactacgactgagggtacttcccattacgactgaaggtacttcccattacgactgaaggtacttcccactacgactgaaggtacttcccactacgactgaacaggtgtttcactacgactgaactcagtggaacaccaagtgttttatcacacaggaagttatgcttcttgcattacccttatttcagctttgcccgtgatattctttctccgaacgtaagattcagatttacgctaaaacgactttcctgcattaggctactacgtgaatttatttgtttccgccaggtggcgcccaatgaaagataagagtaacgaatgggaaaactcgccccggcactgatctccagatacttcatttttccacctctcagatttatataagaattgctgaaacctacccctcccattagttcagtggaccggggatagcgtgggtttgtggtataaattcccccgatattcatcttgtgctgattctcatatttcatggaagtgtaggaggaagtgttacggctccagtccagataattgtagtcggcggtaaccacccaacgttcggtagtcatggacactccgctgccaatgtgcatgggcaggtattgcgtccggctatggtaactcttgtcaaggttgtcgctggtagaggaattactataagtcagattattgtcgtggctgatttgaagggagggagcaaatactaacccggccgcccacttctgccttccggtagtattgaattcataatgtactccgaagtcggcgtaaaaggcacgtttggaagattcatattccacaatggcactctcctgtgtttcactttgagtaactgttcccagtatgatgcccagattcacacctaccgacagatttttggtcagtgcaaaggcattggtaagataacagcggtataagcctcccgatccttcaaataacgaataagtatagcttccgggcattccttccacctcttcttcggtctggatgacgtatcctacactgctgtaaggcgatgcacccaccatggcataccagcgcggcaacacacggaagcctatgctgaagcggttgggattacccataaagctggaactgtgatcgttctggaaagaatagcgggcatacgaagccgatgcaccgacatcaaatataaagcaggtgctgtccattcgggtgatggctgccgggttcagagtgttctggaagccgggcttgttcagggctatgccgatattgcccattccggcatagcgtccgccgtcgctggtacttaattcacctattccatacatggaagtgggcaggtttgtggtgttttgggctacgatagaaaggcttgttgcacataaactgcacagcataaggggaattcggtggtgatgtttcatttttcgttgtatattttaaatctgatatctaatttgcattgtctctcctggtcggggtcgttggcaaagattatctgattgaaggtcgttatcatttcattgtccggcagactcagcagtagtttctgtcgtttgatgccccatgtgccgaagttgttgcggatgaattcggtcacgttaaaagagtagtaggtatcccgcccgaacatctcgtccacactcagattgccagtctgtaccgttacgccgtcgctgccatatacatagtcttccaacacattgttttcgtccgtgatgtagaggcggatatcttccggtagctggttcagcttgttatagcttccggcctgcggataaaggtagagggtggcgctttctatggagacgatttctcccgcattctgtaaattattcagataggggaactctatctggttgtagagcccggttagtccctgcatatacgcatgcttgtccagatcgtaggagtggataaggttttctattccgctttccagagtggcaagggaagtccctgttcggtcgtgacgaatacccgtgtaggcataatctgtatttacgctgaatatcagttctttttccgtgcgctggctggttatctctttataatgcagggtgatggccatggatgattcattcactaggaatcctatgatacatcctccgttgctttcggccacgagggccaggccgggaaatttttccttgaacttatcctggctgtcgaagtagtcttcttcggctatgaggtctgtcagcagttctttacccagttcgtcgggcagacgtatctccaattctcttttttgtccggggcgtggagtgaaggtaaagctgagcaggggagtactctcggtgggcaacgcggtggtggtgtataaatcttcgtcatcatccagataaataggctgtttcagccggtatactgagatgcgttgctgtgtcagcgtatcgccccagaagtggccggagggtgtcattcgcagtacgagtgagtcgaagctgtaactgtagttctcgttgggagtgaaacagtttgtggagtattcggcatagtaggtggcagaggcttcgccccatgacggatccttgtaatgtcccagctggcagatgctgtctcccctggtttctatggagtccataagaatggtgctgatatccacggtgcaagtgtctacatatatattgtaaaaagaactgtcgaccaggcttttgcccagttccgagttttcgtcctggcaggcacagatggcggcgattattataatcaggctatacaataactttttcattgttcatagtgtttttgagctacaagttataggctacgagctacaagtggctgcgctatcataccgaaaggcactcgtagcttgtaactcttaaattctttcgcaaaggaaaatgaaatcttccatatcttcctattaaaatcggctatcgggcgggttttatcggtaaagctatttaccgaaaaattagtgctgtttgtcggttatatttgctgatgaagtacttgccgcctacttttgctaccaaaaatatagtaattaaaacaagttctgaagaaaaaatgaatcgactattatttggaatgatgctgctggcggttggatgcctggccggcagttgtacggacgacgatgaatacacccagggtgtatggatgagaaggtcggacctggacggggttgcacggggacaagccagtagtttcaccatcgataataaaggctatctgtgctgcggtttccgtgggacaaacaagacatacctgaaggacctttgggtgtacgacatcaacaatgattattggacacaatgcgccgatatgccagatgaggcgcaaggtcgccacagtgcaaccgcgtttgctctaaatgggaaaggctacattaccaccggtgtccagaaaaatgagtctacaaacttggcggatacttgggagtatgatcccaatacagacagctggacacggaaagatgactttggcggaggtgcgcgctatggtgcgctggctttttccatcggtggatatggctatgtgggtacggggtataatgacaactacctgaaggacttctatcgtttcgaccctaatgccgctaccggacagcaatggacaatcgtgagtggatttggtggatataagcgtcagtacggtacagctttcgttatagatgatgtggcttacatttgttgtggggataacaatggtactctggtagacgatttatggaagttcgacggtagcgattggaaacagttgcgtgacattgccaataatgatagtgatgaagattatgacgacgattatgccattacccgtgcgggtaccgtatctttcgtcatagacggtaggggatatatcgcaacaggaacccgtagtggggtgaccagtgattattgggtatatgatcctgaagaagatttgtggtatggtgattctgatgatgactatacgccgatgacgaatgtgcataatgtcagttccggaggttcatcacgttcttatgcggtgtctttctccacaggtaagcggggttttgtactgtcgggatcttcgggaaccagttattttgatgatgtctatgagctcttgccttatgagcaggaagatgttgattagtgttttttctatataaagatttatgaagctgatgtttattgtgaagataggtgtactgtcccttgtggcagtatgcctttcttattgttccgggcgtacgaatgccgccggagaaaagttatcctgccgttccatgcaagtggaagggggatatggatatgtggtggtttacggggcagatacactgatttatcagccttatatacctgccataggtgagaagacagcttttacatcagaagaagatgctttgaaaataggtacattggtgtgtcgcaagttagcggagaaacaacctcctaccgtgagccgggaggagattgttgaaaacttaccgtctatgcgtcttccggcggcaggtcgctgacctcatggcgtataggagaacaatcataagggtaattctttagcagtttccctgtaatgattttctttgtgtcgctgccgggccttgacaaggtcatagtgtaactaacttgcaaggttttataatagatgtcagcctgatatctgttttgcttcatgccgaccatgtccatctcgaaactaatatcttttaattcacctctgtacatgcctctgtcggtgtatttctgcttttcttgctcgaagataatttgtccgtctacaatgtttcccggcatatccacatagcggctttctccttcgggattcatccattccttgggatattcgccggtataggtatcgaagtaatattcagtaaaagcattgtagaaggggaaaaaggaagtcttctttatttcctctccgctaccggttctgtctatccaggtgattccccaaggctttgttccggcttctcttactccatcaaattcatctagggagtaagtgatggattctatctgatagtaattggtgcatatcttctgctggatgaatatttgttctgagtaaagtccttgttcggtactcagtttgagaatcaatctgcgctcttcccctgcaaagttatcattcagttgtatagtcagggattttgccttgtcgcgggtgatgctgccccaatggaagcgtacggtgcccataccctccagttttaagggatacccattctcatctgtcatgatgcctccatccggatacataacggaagccacaatccagttggttctggtcatcgggatctctatggagcttgcatcgccttcgacagtaaattcttctgtagaagagaaacgttcatcatttgcattatcacaggctgttccgccgaaaaggatgacaatggagaatattagcgcttggagtacgttcgttcgtttcatgtatctttagtttcgttagtttaaatagcttttgtttatagacgtattttattggaaaatactgcaaacaaaggtatgtttttttagcaagaaaaagatagggggtgatactttttgtagaatattagttgtaccttgtaggtctttaaatcaacaaaatacatataaagtatagaaaacaaattacaagtcatcagggaacaggaaatagaagcatgcctaatagaactgagagggcaaaaagtcctgttggatagagatgtggcaatactgtacggagtagaaacgaagagggtgaatgaagcggtgagaaataatccggataagttcccggaaggatatcttgtctctttacaagtgtctgaaaaacaggaactggtcgaaaatttcgaccggttcaaaacattaaagcatgctacaatggagcctaaagctttcactgaaaaagggctttatatgcttgctaccgttttgaaaagtccccgggctacggctacgactcttgccattatagaatcttttgcccatttaagagaactctcccgcaatctaaatatcttgtcaacagaaacagatgaaggtaaacagaaaacattgactcaacgcagcagtgagttacttcacgaattattgtctgtagaagagaaaggggatacaacagaaaccgaatcttcgatagagctgaatttatatgccttaaagatgaagcgtatggtgaaaaagacaaagaaaggataattgttttgtgcagataagagaggtttttattaacttgcaggcagtttacaagtatactaataaataagactatgaaataccaagttgccattatcggtggaggtcctgctggatatactgctgccgaaacagccggaaaagccggattgagtgtagtgttgttcgagaaacaaaatttgggtggagtctgcctcaatgaaggttgtatccctactaagactttgttgtattcggcaaagacgtatgatgccgcgcgttatgcttccaaatatgcagtgcatgtctccgaagtctcatttgacttgccgaagattattgcccgcaaacagaaggtagtgcgcaagctggtgctgggcgttaaaggcaaactgacggcacatggtgtaaatatcgtgcagggagaggctaccatcattgacaagaataccgtggagtgtggtggcgaaacttatgaatgtgaaaacctgattctttgtacgggttcggaaaccttcgttccgcctatttccggtgtggatacagtacctttctggacgcatcgcgacgctttggataataaggagcttcccgcatcacttgccattatcggtggtggagtgattggcatcgagtttgcttctttcttcaatagtctgggtgtacaggtcactgtgatagagatgcttgatgaaattctgggcggcatggataaggaactttctgctatgctgcgtgcagagtatgccaaacgtggaattaagtttatgcttagtacaaaagtgatatctattgctgaggtttcttccgatgatgggaaaccacaggtacaggtgagttatgagaatgcggaaggtgcaggtgctgtattggctgatagattattgatgagtgtaggccgtcgtccggtgctaaaaggattcgggctcgaaaacctggatttacgaaggactgaacggggaaatatctgtgtgaacgaatatatgcaggcctctgttccgggtatatatgtatgtggcgatctgacgggtttctctttgctggcacatacagccgtgcgtgaggcagaagtagccgtgcataccatacttggccagaaggatgctatgagctattgggctattcccggggtggtatataccaatccggagattgccggtgtggggcaaacggaagaagctctgcaactaaaaggtatcaactatcgggttgtaaagcttccaatggcttactccgggcgtttcgttgctgaaaatgaaggtgtgaatggggtttgcaaacttctgatagcggatgatgaaacgatagtgggggcacatgtattgggcaatccggcttccgaaatcatcactttggcaggtatggccatcgagttgaaactgactactacggaatggaagaaaatcattttcccccatcctacggtttctgaaatctttaaggaagcactatgataatcacaatcgcttcttagcgcttttcaggactcatataaaatattagaacgatgaaaactgtaaaactgattacttgtagcgatgctgctcaggcacacatcattcagggagcattggagaatgaaggcatttcttcccttcttcacaatgagaatatgtctacgttgttgcgcggctacatcaatgatattgccggagtggacgttttggtcgacgaagccaattatgaagctgccgttcgcttgctggaacagaatgagatgatcccggagcaattaaaatattgccctttctgcggttcgtccgacattaagtttgtgttgaagaaagagcatcggctacgggctgtcatgtcggccatcgcctctttgttggcggctactcctccgggaaataatcattgggagtatgtctgccatgcctgtggaggaaagtttgaaaagccggttgcagaatttcattcggctgaaatatgatccgtaagtatatcaaaaggtgctaattccctcaacaggtaatttaatattagtacttatcagtaattaaatgcacatgaaaaaatatcttttgtcgcttactctttctctcttatttattcccatagtactatgggggcagaatacgagtgctaagagtctctcttcccgcctggataccctgataaaatatcagcttcctgccggttccaatgttggtatatccgtatacgatctgactacagggaaatctttatatacctatcaatcggataaactttcccgcccggcttctaccatgaagttgctgactaccattactgcccttgcccgccccgatgcggatgaaccttttaaaacggaggtgtggtatcagggagtcattgaacgggatacattgaagggtgacatatacgttgtcggtggatatgatcctgaatttgatgatgaagctttagactctctggtgaatacggtgagccgcttccccttctcggtgatagcaggcaacgtttacggtgatgtttctatgaaagactccatctattggggaagtggctgggcatgggatgatacgcctgcctcataccaaccttatctctcaccgttgatgctgaataaaggtctggttaccgtaaccgcttctccgggtgagaaaggagaaatggcaaatatcgaatgtgttcccgcctcttcctattatactgtgaccaatgaaacccagtcccgtactccttctgccggacgtttcggtgtttcccgggattggttgcagaatggcaatgatgtgattattaaaggaaacgtggaaagtaagcggataggtacggtgaatatctattcctcccaggatttctttatgtatacttttcttgaacgcctgcgagcaaaaggtattcaatgccccgccggttatgctttcaacgaattgcagaaagatagtctttcagtgcaaatggctttgtttgagacttccactcaagatgtagtcaatcagataatgaaagaaagtgataatctgaatgcccaggctttgctttgtcgtttgggtgcccaagctaccggtaaaaaacgaatttcggatgaagacgggctttctgccattcgtaagcagataaaagctttgggaggagatgcggatagctataaactggctgatggctgtggactttccaattataattatatctctcctgatctgctggtttctttcctgaagtttgcttattcgcgcacggatgtttttcagaagttgtataaggctttgcccattggcggtgtggatgggacattaaaataccggatgcaacgcgggactccctctcataagaatgtacatgccaaaaccgggtcctttacagctattaattgcttggccggctatttgcgtgccgcaaacgggcatgaagtggcttttgccatcatgaatcagaatgtactttcaggagctaaagcacgcgcttttcaggatgctgtatgtgatgaagtaataaaatagttacgagctacaagctacgagctacgagtggctgcgttgatatcgcagaactcgtagctcgtttcttatagctcgtactgatttacacttgtagctcgtagcccgtaactcgtagcttacttatactgtgcccaatctacattcttcatgtctccgctttttgccaattctgcatgcatagccaatgcagcgcggactgcttgcggagtctgagatttaccatcagttattttcaaataatcccagaggatattcttgtaatccggatgaacgcagttttcgatgattgcctgtgcgcgttctttcgggctcttaccacgcaagtcggcaacgccttgttcagtaatgatgatgtttacgtcatgttctgtatggtcgtggtgagataccatcggaacaatggcgctgatcttaccttccttggcaacagacggacaagtaaagatggaaatataagcgttgcgtgtgaagtcaccgcttccgccaataccgttcatcattttcgtgccgccgatatgtgtagagttaacgtttccgtagaggtcagcttcgatagccgtgttgatagagataactcccagacggcgtacaacttccggactattggagatttccgacgggcggagcaccagtttatcacggaagaagtccatatcatcataaataccttgcagacagtcgtttgttacagtgagtgagcaagcgctaccaaatttcacgcgaccgtcacggatcaatccgattacggaattctgaataacttccgtgtacatttcgaatgccgggatggtcttgtcacgtcccaatgcaccgagcacagcgttagcgatattgcctacaccggattgcaacggcaggaaggttgacggaatgattccgcgcttcatgtccgcagccaggaagtcggctacattctgaccaatcttgtcagtcaacggatcagcttcggcaaaactgcgtgcttcgtccggccagttggtttccacaacgcctacaatttttttcgggtctacctggatatacggttgaccgatacgatcacttggtttatagataggtatttcgcggcggtaaggcggatcaagcggttcgtatacatcgtgcagtcccatagcatttttgctgtgagcagcattcagttccacgatgatctgatcggcaaggcggcaaacggtgggagcgataccaccggctgcggtcagataaatcttgccgtcgggagttacttcgcaagcttcgataatggcaatgtttactttgcccatgaaaccgtaacgaacttcctgtgccatctgagacaagtggatatcgttataggcaatctctccgctgtttactgctttacggaaatcggaattggttgtgtaaggagcacgataacggattgctttggcgcgtgatagtataccgtcgcaggagtcacccgtagaggcacctgtgaagattcctatctggaaagggtttccttttgcatgttcagcttccgctatttttgctaattctgccgtaacggctttggctgttccagcgggagtaaatccgctcaagccgatgttgtagccatgtttgatcaggcttgcagcttccgctgccgagatgtaattgaatgccataatgtatttagttatttttcctatgtgaaaattcataaattactggaaaagcttttttaactctccactctcaattctccactctccacttattcaatacttccgttgtagtatttccgaccagatgatggctttccgcgcttcttctgccgaatgaatggagtattcggaatcggtttcaggtttttgcggagtggacagaggaggagaaatcttctgtttcggatgagttgtggtatgcttgggagatgtatttgtagaatctcctccaaaaatatgttttgaagcagagaattgatattcttcttttgctgtcggaacggagggtatttggggggcgggaccttcgggaataaatccgccatatgtgtttccccaggcttcaggaatgggtaatgcgccttcgtcaatatcattttccggcacaggcatagcaggcctgttctcagcgttcttctttgcttctttcttgaactgcttaacaactccgataacgattatgcctgcgattaacagaaactgtaagataccatccatgctcatttaagtttttcaccgccaaaggtaactaatttatctgaataacagccaatttttaggcatgaaaaaagggcagcttcacagctccccttattttttttaacctaaaccttaactatgaaaaaatctaatgtttctttcattacgcaaatttgtgaaataaaatcctttatgccaaataacagtctcgaaaatgttcgttctattaacattaattataagaaacagctcattttctaactattgagtgttatttttcgccttttcatctgtaatttagtgccgaaggcgtatctttgcagctgaaattctttcaccacggattacacggattgacacagatgttttttgagttttctgtaaacttctcattggggaagatagtctgtgttaatccgcataatccgtggtgagtcataaaaacaggaaattatggaaaaagtaacgggagcagactttaaatctgcaactgctgatgacaacaagaagttgttcattgaaacctatggctgccagatgaatgtggcggacagtgaagttattgcctctgtgatgcagatggcggggtattcaacggctgatacgctggaagaagcggatgcagtgtttatgaacacttgctccattcgtgacaatgccgagcagaaaattctcaatcgtctggaatttttctattcgctcaaaaagaagaaacgcaatttgattgtgggagtattggggtgtatggccgagcgggtaaaggatgatctgatcactaatcatcatgttgatctggtggtaggccctgatgcttatcttactcttcctgacttggttgctgctgtggaggcgggcgagaaagcaatcaatgtagagctttctaccactgagacctatcgggatgttatcccttcgcgtatttgcggtaatcacatttccgggtttgtatccattatgcgtggatgtaataatttctgtacctactgcattgttccttatacccgtggacgggaacgtagccgtgatgtggaaagcattcttaatgaagtgtccgacttggtggcgaaaggttataaagaagtcactttgctggggcagaatgtcaactcttaccgttttgagaaaccggacggagaagttgtaactttccctatgctgctccgcaccgtagctgaggctgcgccgggtatacgtgtccgtttcactacttcgcaccccaaggatatgagtgacgaaacgctggaagtcattgcacaggttcccaacgtgtgcaaacatatccacctgcctgtacagagtggaagttctcgtatcttgaaactgatgaatcgtaaatatacccgtgaatggtatctggaccgtgtagatgctatccatcgcattgttcccgattgtggcttatccacagatatcttctcaggcttccattccgaaacggaagaagatcatcagctttccctttctctgatggagaaatgtgcttatgactcagcttttatgtttaagtattctgagcgtccgggtacttatgcttccaagcatttgccggatgatgtacccgaagaggtaaagatacgtcggttgaatgagattattgctctgcaaaaccgcctttccgccgagtctaatgcccgctgtattggtaagacatatgaagttctggtggaaggagtttccaagcgttcgcgtgaacagcttgtagggcgtacggagcaaaatcgtgtcgtggtgttcgaccgtggtacgcaccgtattggtgattttgtaatggtgaaaattacagaagctagttcagcaacactaaagggagaagaggtaaagtaagaaattatcattatagttagaaataaacaaagggaagctgccggagaatttagttccgttcagcttcccttttctttttcaatcccggccgtttgccgtcagtttatcccagtgggttctcatccaggccaccatcgcctgagccaccgccttcagagccatcgccttccgaacctccacttaccggagtgtcttgcaagcatatgctgttggctacgtttgtgacgtcttcgttgcagaaaccgaggtaaatggccagtgcatcgtccttccagttggcgggaagtttcagttctgccttggcatcggagcgtgtggctgctgctatatcataaacagccattcctttgtccttgttgtatgccagtaacatggcggcatctgtaactgttgcgtcacccattccgctgttgtcggtccaggcaaaagttactttactttcgtttacggttactgtggcatccaatgcgggtaccagactgccacgtgtcaccaaagctttgttgtagtcaattgagacatttgttccgctacctttcattgcatgtttcagaatatacgatacggcagcattgaatgctgattgctgtccggaaaattctttgtatccaaaacgcagaaagggtgtcattgcctttgtgaagttaacagctgctgtaaatttagagcgttgattcttctgtttctcggtgcgtggatcactgaaacttaccgccaatgcacgcatataatgtaccgatttccatgtactacctactactgtacctacttttcctgagaatcctccgaggattccttgtttaattgttcccataattttttcttttttgtgttgtaaataaattagttttctttgtgaacttgctaaaaagacttctgcagcaatcttcatcgtgttgttcagtatgcagcgatgtttggttctcgttgcgttggcaaaggtatgggaaagttttcttttcgacctgccatttttgccataagcgttcaagaatttttccgaaaagtggtaatgtattgataatgtattgtttataaacggttttctgactcttgtatgcagttgacgtttcacacggagataatccactactattatgttccgtttttggttaaaaactctttttctccgtactcgattcgtacctttttcgcttctatacagaagtacaaatagcgaaccggatacgagccgggtacgaaccgggtatgagggggaggcaatgtaaagtaagattggctactttttctgattttggtctattctttcttctaacatctgacacctttggccggaaaacattatctttgtccaactaaggactcagtagatgacttatagaatgggaaaaactaaagctattatactctttttagttgcttttttgctgttggcctgtacagcccggcaaagcaataacaagcaattgatatgggcagattcccttatgcggtcgctgccggatagtgccttgtctgttttgcagaatatctctactcaggaatttgcctcaccggctgatagtgcctattatgcgctgttgctgacacaggcaagagataaaaattatgttgtacaggtagatgattcgctgatacgttacgctgttgcacattatgataaagtgggggatgtaaagatgcgggcaagtgcacactattattggggatgtgtgtatagagacatgaaccgtcaggcagaggcactcagagaatatcttatagctgcatctttgacgaaggaaactgtggaaaaacggcaattgggattgatatacaataatataggctatatttattatgtacagaattttaatgaaaaagcagattctgtatatcagttaatggaaggtattgctcaagaattaaaggatactactctttgggcagaatccctatctaggcaaggttctattgcttttatgaaaggagacaactatttttcgattgctgaacaaagattgttggatgcctttgcaatggtagatagagtagataacaatgggataaaggctgatatttcagctatgttaagtcgtttatatagtcgaatggagcaaggtgaaaaagctttattttatggaaaacttaatctttccttgcgaaaggatactgtacgggcttatcgagcttttcttattttaggggatgcttactatagaatcggacaatatgattctgcaactttttatttgaataagagcttgttaagcaaagactatggacgaaaatctgatacttatatgcgtttagcggatatagcgatgttgcaggggaatgctgctctttctatgcaattggaaaggtatagctctgcatataaagatagtttatatcaatctcgtagaaatgcaataactgataaaatagttgaagcagaagctgatgcgcaagtgacacttcagcaattatattataaaggacgtttaaatatgtacctgtatatctttataccggtaataatcataatagtcataattgttttttttctttatagaaaaaataaacaatatcgaggaaaatacgatttgctgcaaaagaacaatcagcaattagagaaggtaaaccaggacttaagtcaacattatgcttgtctacaggaggaaattactcaacgagatctggaaattgaaaatttaaggaaagagttagtttcttgccggattgatgaagagcaaagggaaaaactacgggtagaactggatgagatggttttaaggagaaaagctttggtaaaagaggccttcctacattcgccactttatgcaaaaatgcaggcgattataaaagatcatctggatacagatacatcagataaagaaataagcgatcaagaatggcaggaattaatcgtcagcatggactctcagtggaataatgccatctcacgttttcatgtcaagtatcaattatccaaagaggaactctatttagtatgtttaagtttgacagattttccatttgctcatttggcatatttgatgcattcttccagaagaacactttatcggaaaaagaatgctttatgtgagcggattggcgttgaacaaaacagcgaattcaaagaaatcttgcgtaaaatatagggatggcacacttatgacacactcttttcgcatggacttttgtagtttagcggcatcaaacaaaaagttatgcattatgaaaagagtattatctattttatttctatttttggttttaggtagctcagtgaaagcacaattgggttttggatttaaggagattgtgtttatacagaaaagtggtgatagggatataagtgaccaaaccagtagtaccagtccggaagatgctcccaaaactcgtagtgttgttctccaaccggtgtatgcttacttggataatggagaaataactgtttattttgaaaaagtattccctactgttgcaatcagtgttataaatgaaactacagggaaaactgtttgttcaaagacgcttcttagtcctacaaacttttctattgatttgaacggagaagatagtggagaatatataatagaggttatttctgacggaacctccttagaaggcactttttctttataatatcctgatagataaacgaaggtaatcatgaccggggctgataatatcagtgtcgtactctatcgttatctgcggacattgtctgtaaaggtaagtagagatactgtacatcgcctgcttagtactccgttgggaggcggtatgcgcggtatcagtgatgcactggatgcgcttcatataaagaatgaggtgtttcggctcctgtcacgtgattactttttaaaactggaaactccttttatcacaatgcttgaggtggacaaaaaatctttttgtgttgtgacgaaaaaggacgatttcatcgtagaatttatcaatggagagggtggtaaacgacatgtaaaggtagacaagtttctacagcattggacaggtacagtcttattgggagaacctactgaagcaacaccgaacgagcaattttatataatgagaaatatcgtattttatttattgcgttatagatttattattgctttgctctttgtcctgatattgggactccagactgcgttttgtcagagtcggtcgcttgcctttatgttctatttatctgtattgttttttggaatactcgtatctgtcgccatcctctacaaagagcgggtgaacggggaattcatggagcgattttgtaatatcggtaaggtagtgaattgcaatgaagtgtttcactctaaaggggcaagtatagcagggttagggttaggggaattatctctgctatactttgcgcctctttatctattctcgcttatccggcaggatgatttttatataatttcagttgtatgttgtgttgtagctgtgacgctttctttatactctattatttatcaggtttttattttgcgtaaagcctgcatgctttgtgtattggctgattttgcggtatggggtagtgcggtagctctttatatattgaaaaatgattttgtaatggagttgtcattatcctcacttttcgcatttgtggtcatagggtatatctgtttgatttttgaactacagttgagagccatacaaaccggagagaaggaaaggattactttaaaaaaatattttggcagcctgcttaacccggaaacttttcaaacattgttggcattaaaacctcagatcgggaaaatggtaagtcgggatattgcattgcataatcaaaaagaaggtagtaatgaattgatgatagtgactaatcccaattgcaggaattgtgcaagtgttcatcgtcatatagtagaaattgcttcaagtgttcccgtgtcattagtattggtaacatttccaaatgataggttgggtgaggaaattgcccaggttattattgcggcttattacgttgttggttgggatagggcaatagagcttttgggggagtggtatgaaaccaggcacatggaagacgcgggtatatataatataacggctgaggtacgtgatgtgtggacaaaacaacagatatattgtcgggaacaaaagataagtaaaaccccttctgtcatagtgaataagcattatgtgccggaggtatacccattatcagatttaagatatgtattgacataaagatttattgtagatttagtaattaatagccagaaccttaactttgtttatctgatgaaggtgtgtcaaaactggaaagtaacttaagctcccctcctcccgggaggaggagaattgagatagtactgcattatgacacaccttcaatagtagcattcaatataatggtattaggtgctttatagctgttttgtaatcggataactaaaaaagcacgagcctcccggcccgtgcttttcaactaattgttaactttaatttctatatttattactttgcaattgctaatagattggtcgtgaagtccatctgcttgtggttaaccagagtccaatctgatttattcttattgtcttgcttgtaggctttgtaagccgtcggcatatttgcgtcattcagttcgtatacgcttttctgaacggcttcatcataagctttgtgagattcgttccagcgggcgtaattcatggttatttcattatcgctgtactggtaagtcatcttgaaatagggcacccacgcatcttttgcaccatcccatttggatgcttctttgctaatcagacggttttggtcgtcataagtaaaagtgtattgcatgtggcgttgcagataagagccttcttgcttgaagatagttttggatgcgactaattcgccgttcatcacttgatttgttatgaaaccgtcctgagctttcacttcggagttgagaacacttgctaccataatagctaccaatgcgactgctttaaataaacttgtagttttcataatctttattttttaattgttactatttctatttggctttcgctcttatctgttagacggaactacttgctgaaaagtggcagataatctttattttttttgctgaccgctttcgcttaataatagtcaattcctgtgccaaagtgataagttgttggaaatcaatgaataatagaaatggtaagctgttcattatcggacagttgtccgcttattatcgaacagtgaccggaataaaacaaaatatttattccttttgagacatgagttcaaacatttggtacattatcaatacccttttatcgataacgcaactatttttgcctccaaaataatatgctatgaagaatttctgtttgattaccttatttatttgtttcagtggtttgccggtatggggcggcggaacgtcggaaaaggcagtgtatgacctgatagagcgggttactcccggttatgcttcgcagtatcggttagagatgatacagccggaaaatggaagtgatgtttatgaagtggatggtgacgggcagagaattatcctgcggggaaacaatgctgtctccttggcaactgctttcaactggtatttgaagtatacgtgccatgctcatgtatcctggtttggtaatcaattgaaattgcctgcgaaattgccacagcctgcgaataaagaacggaggattattaatggtaaataccgcgtttatatgaactattgtacggtaagctatactgcggcgtggtggaattgggaacgttggcaacaagaactggactacatggcgatgaatgctatcaatatgcctttgttttctgtagggctggatggtgtatggtataatacgctgttacgttttaatttcacggaagaagaagcccgggcttttctcactggaccgggacattcggcatggcagtggatgcagaatattcagagttatggtggtcctttgcctaaatcggtgatagataagcatgtcatattgggtaaaaagatactggcgcgtcagttggaattagggatgcaacctattcagcagggtttttcgggatatgttccacgggaattgcaagctaaatatccgcaagccaaaatcagcatgaagcggaagtggtgtggttttgacggtactgctcaactagacccgactgaccctttgtttcatgaaatgggcttggcttttctggaagagcaggataaattgtttggtagctatggggtatacgcagccgatccttttcacgagagcgctcctccgatagatacacctgaatatctgacaggggtgggacagaccatacataagcttttccagacatttgatgcgggagctttgtgggtgatgcaggcatggagtatgcgggaagatatagtgaaagctgttcctaaggaatctttactgatattggacttaaacggatcgaaaactgctgctaacggtggttggggatatcctgtgatagctggtaatcttcacaattttggcggacgtatcaatatgcatggcgatttagctttgctggcttctaaccagtataagaaagcgaaggcgcgttatccgaatgtgtgtgggtccggactttttatggaggccattgagcagaatcctgtttactatgaactggcttttgaaatgcccaatcatgctgatagtatccctttgcaggcatggcttgcggcttatgccgaacgtcggtatggggcgaaatcaactgctgccggaaaagcgtggatgtacctgttggaaggtccttatcgtcggggtacgaatggaacggaaaggagctctattgtagctgctcgtccggcattgaatgtaaagaagtctggtccgaatgcgggtttgggtattccttatgaaccgatgttggtgattcgggctcagtcgcagcttttgaaggatgctgataaactggcattttccaaaccttatcgttttgatattgtagatgtgcaacgccagatgatgactaatttgggacaattagtgcacaaaaaggcggcagaagcatttgcttccagggataaggcggcctttgccttgcactcaggacgttttcttgaattattgagagatatggatgaactgctttatacacgtagcgaatatagttttgacagatggttgacggaagcccgcagttggggagagactaaagaggaaaaggatctgatggaacgtgatgcaacttcattggtcactatttggggggctgatggtgatccgcgtatatttgactattcatggagggaatgggcaggtttgattaacgggtattatttgcctcgctggcagaaattctatacaatgttgcagggacatttggatgcaggtactgattatcaggaggaaggactatccctggcttacggtagagaagatttccgtgcaaacgacttttacaaccggcttgctgaatgggaacttgcctatgtggatcagacgggtaaagcacgaacacctgtcactcatggggatgaactggtcgttacccgtcgtttgtttgataaatacctgaaactgtctcgtgaatattatgcggacttctcgggtgtgggagaaattaaggaagaacgtacttatgaaaatgtcggtgaggagtaatagtagttactccccacttttcttcaatattatttttgccccgtattgagtagcgatacttttgcggaaatccaggaaatcggtatagtcttctttggggtaattgccttggtgatagagcaggcgatgaacgataaaaacattgcctgcgtcgcccaaggtaatggaagaccggaacttgccgaatttactttcctgatcaacgggtttaggcaatgattctatttcatatccttccggcaggcggatgctgatgctatctatatcgagatagccataattggtttgaatgctttgagtgcgttctccctggttgttcggactgtaaaagcttctgtggaagatattgatcgggataaacaggcgttttccggttttgtttccatattgttcgctttcgatggtgtacgagatatccagttgaggctctttctgcttgatttcgttggtacggatggcatcgactttagcctgtaccaggttgatgtcggagcgtagccagtctttctgccgggcaggctccatgtcgataatggatgccatgtcttcatattgaaacaggcgggaagtttgtttaacttctacttttgcatttccatccggttgcagggttacgagggtgttgttgacttgtgtattcagagagtccgcatacgttggcaattgacaaagagttccgccgttgggaccaacgagtagagcatcgtgccctgcaatggaatgatgcacgtagcctaagggtaaagtaggattggtacattccagccaaagcgtatcattggataacggtacttgtaagatgacatggttgttttgattggcactggcaaagtcggctaataaacgcctgttagtagtgctgattacggtgtaaacggatggaatacccagctctgtaagcatggcacgcatatagttggatagtcctttgcagtctccgaaaccggtgcggtttacatcggcggcggctatgggttgcaaccctccgattcctagctgtatgctgacatagcgggtagtggatgcgagatactgatagattgcggctattttttcatacggggtattgcagtttgccgtccgtttttgtaattcctcctttagtgtcgggggcagttggtctcttccactcaataactgatattgccattcgccatacgattgccagctttccatactccctttagttctttcgaaagagaaattcaggggagtgaagtagatacggggcagcaattcggatagggaagggctgtagggttcttttttgatagcgggtagagactggactttgacttctgtcaaccagtttccgtcagctgtctgttgctggctgacttctgcctgcatattgatgctccggtaacggcaaggattgtcagccggagtcagaatacggtaacttgcctgcgcaacggattggttataactcttttgcggaacgaagctggggtagccgatcagtccatcgctgttctttatctcccattcgtaggtgatggtaacaggatatcgtgacggggtatattcgaagaaatagtaatagtcgtcgctgacaaggccgtctgaatattcggtaatcttcagttcgctctttttaattttccggatcacattgccggaggcgtcccgaacttctccggagaactttttcagagaggaaaaacggtcgcacagacagacaaaggaggcatcttcttttcctttttcatgcaatacctgtatcacacgtttctctttctggatggcatcggtggatgaactgcatacgatatccgttacggcatcttgtatgatagagtatgcgtcagtacgcaaatctgcttgagcgtacaggttgccggagtaaaaggcggcttgtagcaggagaccgaaaaataatttgttcattttcataatttccgcgttacagtttctttaaaaccatcatttcattattcttcttggcaatcaattcccataattgttgcagttcaggatagtcagtatgcaggaacagcagcttctgcaaccggaaagaatacctgagtgtgacctgattattctgttgcgtgattatatatcggcaaagcacttgtccgtcacttgtctgcaatctctgattctccggcttttcatcgactgtgtatccttccggaatggttagatttatggtcagggacacctgatctgtgtagggaaattctacgggaagtttccgttccgactgtttgaagggagattcggagacatgcaggaatacaagcggattgacgtaaatgaactgatcgttaacagtgtactgcttttcaaattctaccagttcatacacttgcggtgagaagtgggttctcccttccatctggagttttttcacctgtatgttttcttcggaagccagtttgctggcaaactcggtactgtccttggctgtgcggtatttgttacgcaaacgggaggcatactgacctatataaacagtttcacgtgtgcctgtaacaactccttcagaagaaattccggccttcacgcttgatcttagcaggtttgcccctacattttccagattgacccactgactgtgattgtccggagcgataatacgcgcacggttggtcatcagtacaggagggaggacattaaggtagccattttctacggaactgtccagataaaccagagtactgtctgtagggctgatggctacgacaaatgtatttagtttctggatgctgggatggctataaggaagtatgcccatatcccggcggctcattactgccggataggcgggtattccggcatctttcagcatgctgataaggataaagttgatgtcggcattgctgcctgtgccttctttcagcacttgcttgggtgatttgctatataaggcatatttctcattccatctcactttgtttttcagaaacgtgtagatggcgcatattttttcgtccgctcccttcatttgttccagatgcagggcagtcatttcttctttgagcggattgttcattttcagtctgctaccgaagtccgagtccttcagtaatgtttcgtcaatctgttcccagctttgggtgaacgatttgtagagggaaccggggaaatcaattccctgcaattccaggtttacttgtgtgcagtagtcatccgcgcaccacacatgactgtcgtctttcaaagcggggagttggttgccctggaagttcagatgcgtcccggagcatcggagcaattgcgatccgatggataagttgagggaagcgttttcgtttacggtttccagcttttccgcaccgtgcatctctatgttgaatttgaaatactcgggtatggtgacattatattcggtatataagataggaatatcactttgtgctttccaactgtcgatgctgaagaagaaatcggactctatccggtattcatactctatcagtgttccggctttcacctgcggaatggagaatttcaggttcatccggctttcgcccacacgctccttgaacactacatctctcttcattttggtacgtacaatttttccgttttccaggttgtaggcgctggcatccagtccgattatattttctttcatggcgttattaggcagttcgtagtagggaatggtgacatcggcataggaggttccttccggtttgagtaccttgatttttactttatactcagaaaccagccggaagctttctattccccatttataactgacgtcagtcagcttacacaggataacggcggtggcgctggagtcgggttcataaacagccatgttcagttcttccatggtaggtttgccgaatttccggttcggtagaatagtttgtccgtcagcgaatagctgaaaacagcagaagcaaaaaagtaaggagagtaaagcgtttttcatgatagtatgtgattgaagtgttcttgtaccgacaaatatatgttttttttatttaaaacaagtgtttaaacttctcttttattaaatctccttaaagaaagcccgatgcgtcactttttatttgttattttgcaccaaattcgggtatagtgcggtctgttcagttcaggctgcacttcattattgcagaacgttcaatgaataaactcaccataaaagtctgtccggtatgtggtagtgcgcatatagagcgtgctatgacttgcatagaccattatgcttccagcgaggcattttatctgtgccgctgtcaggattgcgactttctctttacgcaagattttcctgtggaggctgagataggcaaatattatgagacccccgattatatttcccattctgatacgaaaaagggccttatgaataaggcgtaccactgggtgcgtggttatatgctggggcgcaaggcacgtctggtggctcgtgaagcacaccggaaagaaggacgtttgctggatatcggtacgggaacaggatattttgccgataccatgaagcggcggggctggcaggtggaagcagtggagaagaatgcgcaggcgcgtgcttttgccaaagaacatttcggtctggatgtgaagcccgataccgcattacaggattttgctcccggaagttttgatgtcatcactttgtggcatgtcatggaacacctggaacatttgaatgaaacgtgggatacactgaatagcctgttgacggaaaaaggcgtgttgattattgccgtgcccaattgctcttcgtatgatgcgaagaaatatggtgcgcactgggctgcctacgatgttccccgtcatttatggcattttacgcccggcactattcagagattgggagcaaagcatgaatttatattggctgcacgccatccaatgccgtttgatgcattctatgtgtcgatgctaagcgaaaagtatatgggacattcgatgtctttcttccgggggatactcagtggtacgttagcgtggttcagcgcgttggcgagcaaggagcgaagcagctcgatgatttatgtattcaggaagaagcagaaataagatgataaaatggtaagatgataaggcatgaagacgaaaagcaagaataattccgtatcctattttgatatgcagttcattacttccagcatcagtacgacgctggtgttattgctgctgggattggtggtgtttttcgtactgactgctcacaatctttctgtgtatgtaaaggagaatatcaatttctctattatcatcagcgatgatatgaaggaaacggatattctgaagttacaaaaaagactggataaggaagtattcgtacggtctaccgagtatatttcgaagaagcaggcacttcgtgaacagattgaggcgatggggacagatccgcaggattttctgggatacaatcctcttcatgcttctatcgaagtgaagctgcactccgattatgcgaataccgacagtattgccaaaatagaaaaagagataaagaagaataccaatgtacaggaagtgcgttatcaggaagatctgataaatatggttaatgagaatatccgtaatatcagtttgatgttgttgggattggctgtattactggctttcatttcctttgcattgatcaataataccatccggctgactatttactctaaacgcttcctgattcatacgatgaagctggtaggtgcaagttggagttttatcaggcgtccgttcctgtggcgtaacttctggatcggtgtgttggcggctgtcattgccgatggtgttctgtgggctgcggcatattggctggtggtgtatgagcctgacttgatcagtgtaatcacacccaatgttatgttgctggtttccgtatcggtgcttgtatttggagtgtgtatcacgtggttttgtgcatacctgtccatcaataagttcctgcggatgaaggcgagtacgctttattatatatagtattgaacattacagcttatacattaatagaggaacaagagatgttttgagtgaagttaaattgtaaacaattaaatcataaataaagagatgagtaaagagaaatttgctttcgataaaactaactttatcctgcttgccgttgcaatggcggtggtgattatcggttttatcctgatgaccggtccggtgtctaccccgacacactttgaaccggatatttttagtgcgagacgtattaaagttgctcccgtggtatgtcttgtgggttttttgctcatgatatacgctgtattgcgcaaaccgcgtgacaagcaaatgaataatgaaggaataaaagaataaaaagctatgtgcagaggggctgcgtcccctatcataattcataaattataatttataaatcaactacatggaatggtttgaggcgctcatcctgggcttgatccagggattgacagagtatttgccggtaagtagtagcggacatttggctatcggttcggcattatttggtattcagggagaggaaaatttggcatttacggtggtagtgcacgtagctacggtgttcagtacaatggtggtcttgtggaaagaaatcgaatggattttcaagggactgtttaagtttcagatgaatgatgaaacacgttatgtaatcaatatcctgatatctatggtgcctatcggcattgtgggtgtattctttaaagatgaggtggaggcagttttcggttcaggcctgctgattgtaggttgcatgttgctggtaacggctgctttgctgtcattctcttattactataaaccgaagcagaaggagaacatctccatgaaagatgcgttcattataggtttggctcaggcttgtgcggtgcttcccggactttcacgttccggtaccacgattgcaaccggattgttgctgggtgacaataaagcaaagctggctcagttctctttcctgatggtaatgcctccgatattgggtgaagggctgctggatggtatcaagttgatgaaaggagaagagattgccggaagcatttcaacgttatcattgctgataggatttattgcagcttttgtggcgggttgtctggcttgtaagtggatgattaatattgtgaagaaaggaaaactggtatacttcgctgtttattgtgcaatagccggtatcgtaaccatcgtactgtcacaaatgcaaggataacggatgaagtttaaagaaggagaagtattatatttcaataaaccgctgggatggacatcgttcaaggttgtgggacatgcgcgttatcacatctgccggcggatgaaagtaaagaagttgaaagtaggccatgccggtacgctcgatcctttggcaacaggggtgatgattgtctgtacgggtaaggctacgaagagaatagaagagttccagtatcatacgaaggagtatgtcgctaccattcaattgggtgccactaccccctcttacgatttggaacacgagatagatgccacttaccctactgagcatatcacgcgggagttggtggaagaaacgttgaagacatttatcggtgagatacaacaggttccccccgccttttcggcctgtatggtaaatggcaaacgcgcctatgacctggcacgtaagggtgaagaagtagagttgaaaccgaaattgttggtgattgacgagatagagttgctggaatgtaatctgccggaaattaagatccgtgtggtatgcagtaaaggtacttatatccgtgccttggcccgcgacattggtgaagcgctgaacagtggcgcccatcttacggctttggaacgtacccgtgtaggtgatgtccggttggaagattgcctagatccgatggattttaaagagtggatagacgctcaagagatagaaacagaagaataacttaaagaaagaatagatatgaaactgtcgcaatttaaatttaagcttccggaagagaagattgctttgcaccctacaaagtacagagacgagtcgcgccttatggtgctgcatagaaagacaggtgagattgagcacaaagaattcaaagacgttttgaactactttgatgataaggatgtgttcattttcaatgatacgaaagtatttcctgcccgtttgtatggcaacaaggagaagactggtgcccgtattgaagtgttccttttgcgtgagttgaatgaagaactccgtctgtgggatgtgttggtagaccctgcccgtaagatccgtatcggcaataagctgtatttcggtgatgacgactctatggtagctgaagttatcgacaatacaacgtctcgtggccgtacgctccgtttcctctatgacggtccgcacgatgagtttaagaaggctttgtatgcgttgggcgaaactccgctgcctcacagcattatcaaccgtcctgtagaggcggaagattcggagcgtttccagtctatctttgcccgtaatgagggtgcggtgacggctcctactgcgagtctgcacttcagccgtgagttgatgaagcgtcttgaaattaaaggtatcgactttgcgtatatcacgctacatgccggtttgggtaacttccgtgatattgatgtggaagaccttacgaagcacaagacagattctgaacagatgattgtgaacgaagaagctgtcggcattgtaaatcgtgccaaagacctgaacagacaggtttgcgctgtaggtaccactgtgatgcgtgccattgagagcactgtaagcacagacggtcacctgaaggcatacgaaggatggactaacaagtttatcttccctccctatgactttacagtagccaatgcgatgatttccaacttccatatgccgctttccacgttgctgatgattgttgccgctttcggtggctacgatcaggtaatggaggcgtacaatgtggctttgaaggaaggttaccgtttcggtacgtatggggatgcgatgttgattacggataagtaatgcacgtttatttcagtttaggaaccaacctcggtgataaggagcagaatctccgtcttgccgtgcaacatatagaagagcggatagggaagattgtttccctgtccgctttttatgctactgccccgtgggggtttacttctgataatgctttcctgaatgctgccgtttgtgcggagacttcacttccgccgttggagatactttccataacccagtccgttgaacaggagatggggcgtacccataaatcggtgaacggagagtataaagatcgtgtgatagatattgatttgttgatttacggagatcttattcttgacacccctatcctgaaacttccccatccgctgatgcaggaacgccgctttgtgatggagccgttggcggagattgcgcccgatgtgatacacccggtattgggaaagacactgggggatatctatcgtgatctgactgattaataaccggtttcctacaatgaagaatagataccgtaacttgttcttgcttttcggaatactcgccattgtcatcatgctttgtacaatggatatggattattccgacatttgggagaacgtgaagcgcataggcttttggtttcctgtaatcatgttgttgtggttctttgtctatctgataaatacctgttcatggtatctgataatcagggacgaccgtcaatatagcgtccctttctggaaggtctgtaagttgtcgatcacaggttttgccataaattacgctacacccggcggactgatgggcggtgaaccgtatcggattatggaactgactccctatgtaggcgtaagtaaagctacgtcttcggtcattctatatgtgatgatgcacatcttttctcacttttggttctggtttctctccatattcttatatatcttcctgtatcctgtgaatacctttatggcaatattgctcactgcaataggggcattttgtctgttggctatctatttctttacccgtggatataaaaatgggatggcggtgaagactttccggttcttacagaaggtaccctttatcaggaagtgggcgtatagtttcgttgtgaagcaaaaagatactctggaacagattgatagtcagatagccttgctgcatagccagcataagataactttctatagttctttgctattggaactttcggcacgcatactttccagtcttgaaatatacattattctaagcgttttcacaccggacgttaacgggtgggactgtgtgttgatactggctttctcttctttgttcagtaatctgatattcttctttccgatgcagctgggcgcacgcgaaggtggtttggcattggctgtggacgggttgcacatgtctccggcattgggcgtttatgtgggactgattacccgcatacgcgaattattatggatagccatcggaatggctttgataaagatcggtaataagaagtaagctgccttttatctgctaaaaagaggcagtacacggattatcatagagaaaaaatctatatctttgctcttgaagtatataacctatagtctaatgtccagatattctgtttctatcttattttgtctttttatttgttccggtctgtgggctgcggtcaaagcggacgatgataccctgcttttaaaactggataagatgatcgagcatcgtgaggtttaccagcaaaaagtggaaaaggaaatagcagacattcgccggacgctggattatgcggaagatgataaactcaggtttgatatattagggaatctgttcactaaatatcgttcatttcggattgatacggctatgattatcgcaaaggagagactgcaactggcagaaagtctgaaggatgaaacgctaatcaatcaggggctgatgaacatagccgatgtaatgaacaaaatgggaaagcatgagaatgcgttgattatgcttggcaaagtgaaacggacggaagatgtaaaaaaggatacttatttctattatctataccacaccatttacttatcctgctataatgatgccatagatgagcccggcaaacaacttgcctggcagcagataaaggtttataaagacacgctgattgcgattagcgaaccacattcttccagctatgttaccaataaatgcggtcggctgagtatgtccggaaagtgggatgaggctatccggctgctggaagattattatgggcaaagtgcagaagataattcggacagagcgagaatggagtatcttctggcagaattgtatttggggaaacaggatactttgcaggcaaggcattatcttattctggcttcattgactgatattgccaatgccaagaaggtgtatatgtctttgcagcatctggcaatacttctcttccaggaaggagacattgcaagggcttataattatatttcatgttccctggaagatgtgaacttcgggaaagcccgctatcgctttattgacattgccggatatctccccatcattcaggccgctaatgatgcgcgtattaaggctgatgagaatcgggtgctcttttcccttctgatactcctgatattggtaatagccctggttgtcgctttcttctttatccgtaagaagaataccaaactgctgaaggtgaagcaatcgctggccgaacagaatctgcgcttgcaggaaatggctgggaacctcacccggatgaatgagcagattcaggaatcaaatcatatcaaggaagaatatatcgggttgctgttcaatatatgttccgaatatatctataagcaggagaacgaccgcaaggcattactgaagattgcaaatacaggctctatggcggatatatcaaagacactccgcggacaatcttccacttccgatgatttcaagcttttcatcagtaagtttgatactatattcctttccatttttcctaattttgtggagtcgtttaatgctctgttgaaggaagaagagcgcgtgcagctgaaggaaggtgaactgctgacgcctgagttgcgtatatatgctctcatacgtttgggtataaatgataattccaagattgccaactttcttcattattcacttcaaacggtttacaactaccggatgaaaatgcggaataaagcgatcattccgggcaaggatctggcaattcaggtacagaaactgtagttttacatctcctttgatcttactttttctcttttactcttatttgtcaatgtattgataaataggatattactttctgctctcttctttatttacttacttttccacttcgtgtagttgttctgctataccattgaaattacttttgcttcgtatcgtatgagacacgcgatgcctttgttacacgtataataaactaatttaaaactattatgaaaaacaagaagaatccggaaacttttggaagtagatggcggtatgtttgggtactgtttgctttggttttcagtgtgagcgttgccgcacagaaaacggttgtaaagggcaatatcctcgataaggataatctgcctattattggagctaatattttggagaaaggaacgtcaaacggaacgatcagtgatgtggacggtaacttcactctctcgatcacaaatcctaaggctacattactaattacttatatagggtataaaaacgtggagatgcctgcttctgccaacatgaagatcgtgatgacggaagatagcgagatgcttgaagatgtggttgtcatcggctacggaagcgtaaagaagtcggatgcaacaggctcggtaacagccattaagccagatgattttaataaaggactgcgcacaaccgctcaggatgccctggtgggtaaagtaccgggagtaaacgtagtatccagttccggtgctccgggcacaggcgccacgattcgcatccgaagcggtgcttcgctttccgcttccaacgatccgttgattgtgattgacggtgtaccggttgataactctactatcgaaggtggtggcaatgtgattggtggtattaatcccgatgatatagaaacctttacggtgttgaaagatgcctcggctacggctatctacggttcgcgggcttcgaacggtgtgattgtaatcactacgaagaaaggggctgataccaatttgcgctttaattattcaacgaacctgtcggtaagtacagttactgaaacgctggatattctttctgccgatgaatttcgccagtttgtttccactgtatccggagtaccggcttctgtgaccttaggcacggcatcgaccaactggcaggatgaaatctaccggacggcattcggacaggaacacaacttttctgtatcgggtaaagtgaagcaaaatgctccttatcgcctttcggttggatataccaatcagaacggtgtcatacgtaccaataactacgagagatttacattcaacggaggtatttcgcccaagttttttgataatcatctcacggttgacctgaacctgaaagtgtcttatgagaataataagaaagtcgatgaaagcgtcgtaaataacgcgcttcgctatgatcctacacgtccggttaagaccggaagtgccactgcggctactgatccggggttgggatattttatctggatgaacggtaattctccgatggccatccagacggataatccggtggcgcagcttgacttgcaggatatccgcaataaagtgacacgctctatcggtaatgcatccttcaactataaggtacatcatttggaagatttgcaactgaacatgaacctgggatacgatgtcctgaccagtaaatactcgaaggaagtgcccgaactggcgggaatgatgtacacctctaacatgaaggatggtacaggtcttgtctatgactccaagcagaacaagcggaattatctgctggacttatacgctaactattctcatgttttcaatgagaagcataacttcagtgccatgggcggatacggctggcagcatttctggaagaagtttgatgctactaccttttctccggagggcaaggaactcttctctcccaatcattatgaatcggaatattatctgctttctttttacggtcgtcttaactattcgtatgataaccgctatatgattacagctacgttgcgttcggatgcttcatcccgttttgcaaaaggcaatcgttggggattgttcccttccgtggcattgggatggaaaatcagccaggaagctttcctgagagattcggatattctgtctgacctgaagttgcgtctgagctacggacagaccggacaacaggatattctgaacgactatccttatatgacaactttcacagtatcctatcctgaagcttgctatcagttcggagataaatggtataatacgtatcgtccgaatggttatgactccgacattaaatgggagactaccgagacttataacatcggattggattacggcttccttaataaccgtatctatggctctgtggactattaccaacgccacaccaaggacttgctgaatacgattcctgtgatttcgggaaccaactattcttctgtgattaccacgaatatcggtgaaatggataataaaggactcgaattttccattaatgcagtgccggtacataccaaagactggaaatggacagtaggcatgaactatacctggaacgattcaaagatcacaaaactgaatgtagtggattcggaagccaactttgtacagaccggagccatttcgggcaccggtaaaacagtacaggtattcatggtaggcgaacgcccttatactttctatctggcaaaacaagcttatgacgacaatggcaagccgatagaaggccaatatgtacagccggacggttccgtatcggcaacagaaacaaagtatgccaccaacaagagtgcattgccggaatcctatctgggcttcaatacccaactgagctataagaactgggatttcgctatcagcgggcacggagctttcggcaattatgtctataactacatagctgccgaccagtatgtacagtctgtttatagcgaccagggaaacttctcgaatatcctgagcagaaccaaagctacaggtttccagaaccagcaactgtattcggactactttctggagaaaggaaacttcttccggattgacaatatctcattgggttacactttcaagaaactgtgggatcagtcaagctctttgcggctgactttcggtgttcagaatgtggctacctttaccggttattcgggcatcgatccggaaatctacagcggtatcgacaaggagatatatccccgtccgcgagtattctcattaagtgctaatttaactttctaacggattaaaaaaaactatgcgatatgaaaaagataattgcctattcattcaatctacttttcttggtcacgtttctggcttcgtgcctgggtgacctcgataccatgccactggataataaccagttagtgagcgaccaggtatataagaccaaggacggctatacaggcgtgctggccaagtgttattcatctctgatcctgacaggacagcagggtggcgatggcggcaatggcgacttggaaggtgccaatgaaggatattccggttatgtgcgtctgttgttctacttgcaggagatgagtacggataactttctgatgccttcttcttcaaacggtctgcgtaagtgcctgaacctgcaatgggatgcctccaatgcttctgttgtcacctggacttaccagcggctttatatgagcattgcttactgtaacgagctgctgcgcgaatgtaccgaagggaagttacaggatagaggactttgggaagaaatgaaggacgaatacattggttacagagccgaagcacgttttatacgcgcatactgctattccatgctttgtgatttgtttggttccgtgccctatgtggatgaacatacaggtgtgaaggaaattccggttcagtatacccgtaagcagatatttgaatatgcggaaagtgaattgctggctgttgagaatgaactgaaagctccgggagaaaacgaatacggacggattgaccgtgtagccgactggttcctgctggcacgtatgtatctgaatgccgagtcctggattcatgaaaataaataccaagaggcatatacgtatgcgaagaaagtaattacagacggacactatccgctggcttccgactatcgtgaaatcttcctggcggataacaaaacctgcaaggagatcatctgggggttggtgcaggacggacagcgtgcccaaagttcagccggaacaaacttctacgtaaaagctttcgtgaatggtccgatggacgaattgtataagacaggagtcggttcgcgaggttggggtaatgttcgtgccaagatgacactggtagacgcctttgatgcggatgatgtggcgtttgatgtcaatgatacctggggtaacggaaagaaggataaacgtgcacagtttatgaccgcccttccgaatcaggtgaaggaaacctgggactcggaactgaatatgaccagcacctttacctgtggttatggctatatcaaatggagaaatgtaaccaaggatgatcagctctgtgcttcgggtgatgcttatacctctattgatttcccgttgttccgtaccgccgatgcctatctgatggctgccgaagctatcttgcgtggcgcaaatggtacggaaacggaagcattaggctacgtcaatgaagtccggtccagagcgtatatgtccggtaaatatgcgaagagcggtgtccgttcggatgtttcaggagaaatcggcctcaatgaactttctttgaactttatcctgagcgagcgtcagaaagaactggcatccgagctgaccaggcgcactgacctgatccgtttcggtaaatatacgaaaggcaataactgggactggaagaacggtatccgtctgggaggagatgtggacgacaagtatcaactgttcccgataccggaaagcgaattgaccaacaacccggcgttgaatcagaatgacggttataaacaataaatgaagaatagaatgagactgaaacaattactgttatgtggtatgatgtggatgtgctgtgttcatcttggagcgcagacatccaaagaagaaatgttttctactattgagaaaacgggtggagtctattgggcctatccacttgattttgcaccgcaaacccgggctcccaaaggatataaaccattctacgtaagccactatggacggcatggttcccgttatctgattggcgaccgtgattataaatggttggtcgacctttttgaagaagcacatcgtgagggtgcactttccgacttgggagaagatacccggcagcgtttgctgaaggtgtgggaagaagcggaaggccatggaggtgatctgaccccattaggtatccgtcagcatcgtggaattgcagaaagaatgtatgccgcatttcccgaagcctttaagggcaatccttccatttctgcccgttctacggttgtgctgcgttgtgcgatgagtatggtggcttttggtgatcgtttgaaggaactgaatcccaatctgcgcatttcttatgaagccagccataagtatatggactacttgaattaccatacggatgaatccaatcgctttacttcttccactgacggtccgtgggctgaagaatacagaaagtttgaagatgttcacaccaatcccgaccggttgattgcttctttatttaaggacaagcgtttcatactgaagaaagtgaatccgaaggaagtgatgtggggtatgtactgggtggcgagtgatatgcagaatgcagagacgaaggtttccttctatgatctgtttcagccccaggagctgtttgatttgtggcagtgcatcaattatcgtttctatgtgggcaatgcaaatcatgccgacgggaaagggattgttgtagccaatgcgaaatcattgttacggaatattctggatagcgccgatgaggctattcagaaaggaggcatagccgctacccttcgcttcgggcatgatggcaatgtgattcctttggtggcattgatgcagatagagaattgtaacgttgccgtagatgatccttacgaggtgtataaagtgtggagtgactttaaggtagtccctatggcggctaatgtgcagattgccttcttccggaatgaaaaaggaagtgcggatgatattctggttaagattctgcataatgagcatgaagtacatattccggtacagaccgaccagtttcctttctataaatggagcgatgtggagagttactaccggaacttattgaaataaagcacagttttaaagttaacaatattgaaactactaaatgggaagtgtgccgatgggatatcggtacacttcttttgctaatataatgttaatgctttcctgtttatatgctatttcataagaaaacctttatctttgcacccgaaaatgaaatgtggaaagatttgagtagcttgcaaccacagaaaaaaatgctaaaacacatccttttctgacgatgctccgagcatcgggatatgcatgtctactcaccaccagatccccgcttttcattctttaattattcattctttaatttagaagtatgggatatttattcacatccgaatcggtgtcagaaggacaccccgacaaagtggccgatcaaatatcggacgctgtgcttgacaaactgttggcttacgaccccagttcgaaagtagcttgcgaaactctggtaactaccggacaggtggtactggctggagaagtgaaaaccaaagcgtacgttgatctgcaactcattgcgcgcgaagtaattcagaaaatcggctataccaaaggcgagtacatgttcgaaagtaactcgtgcggtgtattgtccgccattcatgagcaaagccccgacattaaccgtggtgtagaacgtcaggaccctatggaacagggtgcaggcgaccaaggcatgatgttcggctatgctactaacgaaacagaaaactacatgcctctttcgctcgacctggcacatcgcatcttgcaagtgttggccgacatccgtcgtgaaggtaaagagatgacttatctccgtccggacgccaagagtcaggtaactattgaatacgatgataacggtacgcctgtccgcatcgatacaattgtagtttctacccagcatgatgatttcatccagcctgccgacgacagcgaagctgctcagctgaaagcggatgaagaaatgcttgccactatccgtcaggatgtcatcaatatcctgatgccacgtgtcattgcttctattcatgcagagaaagtacttgcattgttcaatgaccatatcacctatcatgttaatcctaccggaaagttcgttatcggcggacctcacggagataccggtctgacgggacgcaagattatcgtagatacctacggtggtaaaggtgctcacggtggtggcgctttctccggtaaggaccccagtaaggtagaccgtagtgccgcttatgcagcccgtcatattgccaagaacctggtggcagccggtgtggctgacgaaatgctggtgcaggtgtcttatgctattggtgtggctcgtcccatcaatatctatgtcaatacttatggccgcggccatgtaaatatgagcgatggtgagattgcgaagaagatagatgaactttttgatcttcgtccgaaggctattgaagatcgcctgaagcttcgtaatccgatttatcaggagactgccgcttatggccatctgggtcgtgagccacagattgttaccaagcacttcaagtctcgttacgaaggtaataaggatgtagaggtggaactcttcacttgggagaaactggattacgtggacaaggtgaaagccgctttcggtctgtaatctttctctggttttgtaatcagcgtagctttacaagctatttatatagaagccgtcctgcttcctttcgtgtggcgaaaagaggggacggctttttattgttctcattttagtatagagctgtttcttgtaaatatgctgttttgtttgttactaacaaataatttcatagcttattggcaaatgatttcatttgttgtcagcaaacgaatcttttcctctggttgtttttaaggggacagaacgattgtagggtgggctggcaaattgttttctatttattgatgttttaatcaaattgatgttgtttctttattttatgtgattataggtatttctcaattttgcattatagaatattctatgaataaataaggaatgtaaattcgttattcttgcatattcttacatgtttccgggcttcttatgcagaaaagggttactacttatggaccataaggttactacttataggtgatatcattactacttacggtcaaaagggttactacttatgggtaatgcacttatttgtgccggcaattctccttatatttgtgtttttagggtagtgttttactctaaaagaagtgtaagtatttcgatatgttattaataatctgtggcttgctgaatttcgtttgtttctttttacctccaaggtcagttgttcgggaataatgcattctcagacaattagaaatgcaaagtgtcaaaatgataatgggctactatttatgtttcaacagtttactttctcattggctttttccatgatttgttactatctttgttgtattgaaacgagaagtctaaaatagcatgaaaaaactgttacctgctttcctgttcttcatatcatttactattctgctgggggcatgtagaagaggttctcatgcagtcagttctattctgttattggctgattcgttgatgcagtcgcatcctgacagttcgctgcaattgctagaagctatacctgcaccgcagaagatggggaaaacagacagggcatggtatgccttgctgcttacgcaggcgaagtataagaattatgtgtcgctggagaatgattctttaatacaggtagctgtggattattttgaaaagaacagtgatagagaacaattggcaaaatcttatttttatagcgggtgtgtgcatcgggagcaagaagacatacctactgcgataaatttatatttaaagtcattgagaactatgccacaaggaggtgactcggtatttttgtcgatggtatatgggcatttgggagattgctatggagaacaatatttgaattctgctgcgatagatgcacataagaatgcttatgctctttgcggtaccgcgcatattgatcgggctttgtatgccttgttgaagataggagacaattacctgataaaagatgattctgatagtgctttcatttattatcagtaggcgaagcttttggctgattctttgcaaacttctgcctttaaacctcttgtttataaaaatatagccgctctctataatgagagaggagaatatgaagaggcgaatagttatatctcagaagcaatgagagacatagaagtggaggaaagtctttattctatttatttcttgaagggtgatattatgaatcatttgaataaaaaagattcggctctttattattggaatctggctaaatattcctttgatattgaaactaaagcctctgcttttgatagactatttgaattaaacaaagagcaatcccgctggcgagaggctgctttgtgtgccgattctttcatcgtttactttgattctattcaagcgagtgcgtatcgagccgaaattggtgatttgatggacaatcatcaattggaaatccataaatacgcattgttgaaagagcatcaacttgcaaagaaaaagatgatttactgtttttggggcttatttttagtattggcattaatttatatgtggagggataggtgtcgtaagaataagtatatagctctgcaaaaacaattgaatgagaatcgtgcggaaataatgatgctgagtgaaagctctgcaccaattgaagaaaaaagtgcagaattgcatgatctgaaagaaaaaaacttgcagatttgtatttcattattcgaagcaactgaggggtataagaaattgaatgagttgaaaaatatgaagcctggtaaacgcattctcaaaattcaggattatagggaaaggattattggtgatatccgggaatcattcttagatgttatgaataatttgagggagaattgccgttcattaactaatgaagatttattttattgcttgctgaacctgcttcattgtcccaaagatttgcttttaggtataatggatgcttcttcagatgctataaaagcaagaaaacaccggattaaggataaaatggatactgttctttttgataaggtgtttggttctgataatcaaaaacttatgtgattgactctatagagtgttactgtaagtctacatgagtttgttacctctgttaccttttttttcttgattttcataataaaaatttagttatttggagcattaaccaattaatcttatatattatgaaaacaaattttttattcttgttattgatagggattttattatcagttcaggtttgggcagaatctcaatctatgaggaaacggattatattaaaaactgctacgaatacttctcaaggcactcctcgttctgtagatccggcttcatggattatcgcttgctatgatgttgaagatagtaaattatttattgatattcctgtcccatgtggcactttaactgtgagcgtatcagattctttgaccggtgaaatggcttactatcagtcgtactttgatgaaagttgtatagtagtagacatgtccggcacgaaagtgggagactatgtgttagagatttctataggagaaaccttgttgttgggaggattcagtattgaataaacactacacatcatgaagaatgacaaacgaatatttaaacggatagctgtcatattcctgctattcgtggttttatctatgtgggcagccgctgatgcatacgcccaaaataaaatcaaatatacctatgacagtgccggtaataggttgtctcgccaaaaggaaattgtggttcagacaaggggtgctttgagcgatgaagaagaaccatcggtatatgaagaagaactttcagaaacgaaagttactatttatcccaacccgacaaagggagtactcaaagttgatatctcaggagttgaaaagtttgagaacgcccaaatatctctctatgatcttaccggaaagttgttgcagcagtgggcgggtatatcccagtccaatacaattgatttatccgaacggactccaggaatgtatatcatgcaggttgcctacaatggtaagattagcagctggaaaataattaaagaataagataaccttaaaacacactcctccatgaaaacacatttatcattgatattttttatcgtgttgttctcatcctctgttcatgcacaacagggaaatactagatcatatccaattgaagttgggacttataattctgaatttgattattctgattcacaaaacacggaagattttacaaacaattatacggggcgaccttccaatgatgttttttataaatttactataaatactaggatgaaggtcatcatgaagcattgcgaatcagagctttctgatacctatttgagccttttggatgcttccggaaaattaattgactataacgatgatgctgacttctccatgggctgtggcggtggtgctggagaggcttatttatcaaagatactggatgccggcacgtactacgtcgtggcagaaggatatgaagagaacggagttattactactcaaataaccgggatatttttatcttcagaaggggatagtcgacagagtgctattgacaccggtacttacagcaagagttttgactattctgatacacagaatatgagtcttttttctaatcagtatgcagccggagaacaagaggacgttttctataagttcacattaacccgtaaaatggctgtaataataactcattgcggatcaatggtctatgaaacttgcgcctatctgttgaatgccgcgggaggtgttatcgcttccaatgattattactcagatgatggtcgctgttcttcatcctctcatgcctttatacagagaactttagaaccgggcacctattatatagtatcggaaggatatgatacagcagaacttattaccaccaatattaccggatatgcctcggaagattttgattatccggacattcccaacacatatagtgcggaaccggaagccgttggctctcttggtggaacttttgatgtatcggctactggagctgctacgtattcaattcctattaaaattccgcaaggtgtaggaggtatgcaacctacgcttgttatcgtttataatagtcaggcgggaaatggaatgttgggttggggatgtaatttgtcgggaatgtcagttataactcgcggtccgaaggatatgtatcatgacggtacagccaaggcattgactttctccgccgatgaggcctattatctggacggcaaacgcttggtttattcttctggcactatagggcaagagggagccgtatattatccggaatccgatccttttactaaagtgattgttcatggcacatacactacttctacagctaatacatggtttgaagtacaatcttctaccgggcagatatgttattatggaaatacaaccggtgcccgacaaagctacacagccggtaattcccccagaatctatgcatggtatctggattacgtggaagatccgttgggtaattacatgaattatacctataataagtggagttactgcatgtaccccaacactataatgtatggaaataataagaatgggagtaccggtttacagaatacggttactttcagttatgaaactcgctccaatgatccacagctatttgttattgaaggcgtaaaaggaaccatggatcgtagactgaaaaccattacaagcaaaacgggaagttcggtttaccgtgtttatgacttgcaatacaataccaccggtgatgcttccggtactaaatattcacgtctgacaagtgttacggagaggaatggcgccggcgatgttatgcaacctgttaagttaaactggtcttatttgccttccctatatagtattcctgtttctcctcaggtgaatgctgcttctgtttatccagcagtcgcattttctgaacagcaatttattgctggtgatttcaatggagatggtttgacggatatgatgggaatctctcctgtaaagataccgacaggtacgaattcttggacttatgatacttacgcttatatatattgggcttcgctggactcttctggaaatgtccgatttgtcgatggaacgaattatcgtcttggagcaagttttcaattgtctgacatgcaagagtacaaagcgggatcgtccgtcatcgattttgatggagacggtctgaatgaatttgtagtaccacatgtaagcatcaatgatcattggaagcaaatagctttttatgtttatggaaacacggttcagggggctttcggatataacttacaatacagcagcgaaatgcccgcctatgctactggtgatttaaataatgacggaaaaggagatattgttttcatagaaaagggacatagtggtaacaggtatccgggtgaaattattgggcataattcaggaacatctttatatcgcacggcatttaatttgactttaccttctagtcctgataaggtatttgtatctgatctcaacggcaacgggttggaagatatgatggtaatttatagtggaggttataccatcttttggaatcagggtaacggaataacaggaaccaccttttcggatgctaagaaaactacgggaaccaatgtttctaaagtgtggatgattcgttccggtgatttcaatggcgatggtttaatggatatcctaatgaacagtaccggtgaaagtagttggtattttgctttgaataatggcaatggaacttttactaagtcgcaggcatgcacattggggctttacgatcagagctttacttcaaaagatgattcaaggtttgattgccttatatatgatttcgatcttgacgggaaatcggatgtggtgataaccaaggccatgtatgataagaagagcgctatatttcaaggttcttggggcgaattcaataaaacttatacctattggatgcattctacaggaagcgcgcttaccatagtgcgttcggcgacttctaacagagatgaagatgccctctcatcccgttatctggtgggcgacttcaacggtgacggtcaggtggaactgatgaattatggttacaattgttataatagtagcgatgcaaacagagaccctgtatggcgattataccctaatagtagttacaatacagacaaaggtaaggtaacttctgttaccggtgactatggcagtgtgacgaatattacttatacctcccttgtcaatggcggtatctataccaaaggtacgggtagcagttatcctgttgccgattatactttgcctttgcatgtagtaaagaaagtaaattcggataatggtgcggcaggcagaacaatgacaactaactatcgctacagtggccttaaaatgcatttgcaaggaaaagggctgttgggaatgtcttccatgatagctgagaatacgacgttgggaacggtttctgaatctggtgtaaaagcatggaatacttccttctatataccatctgctacctatactaaaaataccatagacggcagtacggctgaaactaacactacgctgactattgtggataaaggctccaggaaatactttgcttacccttcatctactacagagaaggatctggatggcaatatgattactaccacccgtcagttcaatactacctatggttacatgacccaggaaaaggcagactatggtaataacatgtatcgcactgttcaatatggcaactatacccttgccggaaaaacctatcagccccagctgatcacaaaggtacagaagcatacggacgactcgtcgactttcacgcagaagatggaaatcacgtatgatacctctaaaggatataaaacgaagactgttgaaaattatggttcctctttgcctttaactactgaattcacctacgatacttggggaaacgtgaagacggagaaaatcagtggctctggagtttccgcccttaccagcaactatgattatgatacaacgaaacgttttatcgctaaaacttctactaatccgttgtcatccattattgcttatacatatgatacttggggaaatgtcctgacggaaactgacgaaagtgatacttccaataagttaacaactaggcatacgtttgatggatgggggaacagactgtctactctttttcccgacggtactaagagaagttatctgagtggttggaatgtcaattcaagtaaacgattctttacgcttgcccaagctacgggagagccctggataaaaacctggtacgacaatcaggggcgtgaggtattggtagaaacaatcggtccccaaagtatgtccattaaagaggctacgacttataacaacaaagggctgatcactcagaaaaagacagaaactggcaatcttaccacgacggagaactatacgtatgatgctcgtgggcgagtgctgacccaaacaagcagtgcagggagatccgtttcttacgcttatgggaaccgtacagtatcgagtaccacaaacgggaaaacttatacccaagtctatgatccctggggtggagtgaaatccgtgaccgatccggtttccagcattgcctatacttataagtcactgggaaaacctcaaaagatagtcacaggtggagctactttcactatgacttattatgacacgggcaagcaaaagacgttgaccgatcccaatgcaggtaccataacctatacgtatgacgctgccggacgattgaaaactcaggttgacgggaaaagtaaaaccacgacaaatacctatgatgtgctggggcgtatgtcctcttccgcaacggatggtgtaactacgacctatacctatggaacgtccggcaacaacttgctgcgtctgacaaaggaacagacgggtaataattacacgacttatacgtatgacaattacggtcgtacgaggactgagacacgtcaaatagaaggaacaggtgctttggcatttacttactcttataactcacaggggcaactgagtaatattgcctatcctggatctttgaccgtcagtcgcaactatgacgcttatggcaatctgcgacaggtgctggcaggtacgcaaaatatctgggaactcacgggagctaccggaactgtcactactaccaaacttggcggtacattgatttctaccgaaacccgtaattcgcaaggcttacttagtaacctgaaaacgatgaaaggcactacgtcgctgcataatatgaactatgtgtttgatggtgctacaggcaatcttacttcgcgtacgggtatgattgggcaaacggaaaccttcacttatgacagtgcagatcgtttgactgttgtaaagcaaggtagttctacagtcatgaacatgggttatcatgccaatggtaatattgtttctaaaacaggcttgggttcatacagttatgacaaacctcatgcggtaagtaccgttgacaataccggtggcctgatttccgagaataaccagaccattgcgtatactgcatttgataaagtttcctctatcagtgaaacggtcggttcgaacaattacctgttgaacatcacgtatggtcctgatcgccaacgttggaaatctacgttgaagacgaacaatgcggttgcacgtacgactgtatatgcgggcgattatgagatggtcaccgaaggcggtgtaacgaaacaattatattatcttggtggcaataacggtttggtagcggtatatgtgaaacaatccgggcagcctgataagatttattatgcccacaaagaccatttgggcagtgttgtgaagttgaccgacaatgcgggtactgaggttttcaaggcttcatacgatgtctggggcagacgtacggtagctaataataccttcaagttccaccgtggctatacgggacatgaacatctggatgagttcaagctgatagacatgaacggccgtatgtacgacccattgctggctcggttcttgagtcctgatccgtttgttcagatgcctgatttctcacaaaatttcaatcgatatacttattgcttgaataatccgttaatatatacggatcccagtggagaatggaactggttagttggaggtttagggtttatttttggctatgtaagccatggacttaccaatggtaattgggggtgggaagcactaggtaatggcgtgctcacaggtgcaatgtggggtattggatataccagtggggttaaagaggctggaacatctcctttgctttattctgcatattcagctggaagtagtacaattaattcatttatgccctctatgaatatgcctataggaaataattttggtttatcggtatcgccgggaataggatttggcactacaggctttacggcgggcattaatgccggtataggctattccgatggagactttagcattggtgctggtgttggagtgggtgataatcattgggggtggaatgcttctgcaacctataatggcgttggagtcggatatggtttgacttattatgggaagactcaaggtccggacggaaaatcgaacgcacaaagagttgctaatataacggcatattggaaaggtggttcttttgcgttgcaaaatgacatgatatctttaggaggagatggtgacagatggagaacaaatgcgtttgaattgagtgtaggtgatttctcatttgggtcttatatctatactaatgatgggaaggcggatagtggcggtaaggataacgagagtagaacagttgataggaatagtccgatatggggaaaaaatagaaataaaggttttagtacttggaaaaatggacaagttttctctgctcctgtatggattggatatagaagaggaaatcagattacccgtattggctacagtcataaagtgtttcaggacttgcaacagaacggaattcacgggcgaaccggttttggaaatcagaatttttatctgaattatgagaattttaaaacaggtggttatttctactcgggctattacaatcctttgagtttatggggaaaataaaaatattcaatatgggaaaaataaaattggcactaattgtatgtacatgcttaatgctatcatgttgtagcatccctagacatataaagaatgcattcactaactgttatgcaaatacatataccggtcttgacaccttgattaatatagatgggtattatggtgaaatgatattttatgataatggaatggctataaggactatttatcatttaagagaatctgattgtcccaagtatagttcgtacatggacgaggttatagtaaatcctcactcgaaatgtgcaaagaaattctacaactctatcgattgtggaagttatgtgatttatggagatacaataaaggtgcaaatgataagtgactataactcacacactggctgggacagttgggagaaatggtataaaatagtagataaaaacatattaactattttagaaaactttagtcttacaactaataaagaagaaagagaacactctggagaatattataagagtattaatccttctcctggagtagtctcatttgtgccaatgccatttaaaccgacattaggacgtttttggatattgaaagaaaaatggttctggtgcaatgagcaagactgggaaaactatataaaacatattgaacaattgaaaaaacagtttaagaagaaataagtgatagagtactcattcagccggacgatatatccggccgaatgggctatccatattttttcgttttattacttgcatgttcaatgcttttatggtatatttcctctttgttttcttaattatatttcaaataatccaataattctgatatgaatatgaaaaagcacgttttattagttctacttttgggtctaacaacctctttctgttactcacaagtaaaagtcagtgtacaaggtggtgccggtttcagtggcatcacaaaggataaaaattataaggctgacttcggataccgtttcggggttggggtggagttccctttagctcgtgcctggtcattacagacaggtctccaactcttgaacaggaaaagttccattgatgaagatgtattagaaactcgccaatacgaaggagagacagttttgctctatgagacgaaaaagtctaaaatgagcgccgtctatcttcagcttccagtgaaaatagcgacatatctacccttgaatacggattgtggtttacaaataagtgcaggaccgtacatcgcttatggtattggaggaaatattaacggtgaaatgaaacgagatcttcattggagtggtagtggtcttgttccggaagggtttgaggacttgggtactcatcgagagtttcgttctgatactttcaataaagacagaggcttgaaacgattggacatcggattgagtgccggagtagatttcaagtacaaatctttttttgtcggtggcgcagtggagtacggcctccttcccgtcagtaaggaatttcttaaaagtatgttcgaggatgttttcgacgaaaacaaaataacgaggtctcctcatcatttcggggtggaacttcatgtaggttactgctttaacttgtggaaataaactgtactccattcagcccaatattttattgggaatcatttcggagaacctcgaattaaaaattcttatactcaaatacaagttttatgatacggaataaatacatcttatgttttatatttctgttatttgcagccacttcgtttgctcagagcagatatgctctttcattttccgattacatggatggaaagtttactgcattggagaatcttactattgaatccaggtcccagagcaagagattctggaatggaggcgctgattttaaaccgaagacgggtgataaaaagacagataagctattgaagaaagaggtaaagtatatcatacatcaggataccttgtatgtaaactgtcggcaattaagatatgagggatgcaggtttggcagttggtatgcacccggtttccgctttggtacaaacaagatttgttttatcggtactaagattggcaaaaagcagataagtgaggctgttgcggggggtatgctcttcggtgccataggaggggctatcgtagcgtctaagcaactgaaaaacaaagtttgttatttgatagagtctgatagcaagaaagtgaaactcatcactaaaaacaatatgagaactattttgctgaattatcctgagtattcgcaggaatataacgctttgcccgaagaaaagaaagagtcggcaattatagtcatagagtatcttatcaaagcgggattattaatgagatattagaaaaatctataaaatgaaagtcatgaagtatgtgttattgatgtttggcttatgttgcctgaatgtcagtgtttgggggcaagaaaagagtgtagttctcacgatggaagatgcggttgggatgcaggaagcacaaaaagagcaggagaagaggataagagtaccgagaaacacgtttattgtgaatttcggctatggatggataacgagtgaggtggtgatgcgctcgggatcttacaagtggaaaggagggggagagtataaagtagcgtataactgggtcggtgacggcggatatggatttggagtggaatgtgaggctattactactgatttcccggaggaacttgtgacgttgggttatgtggctcctgtctttgtctattgccagaagctgggtgaaaggtggatggtcaggggaactgcgagtatcggatatacctggaacggtgcgggcaatgaccggttctcgggggtagcggcagagctcaattggggagtggaatatatgttgaataaagtaataggactggggctgagtgcgcgatggtggcgggcatctatctcccgtcctgatggcatttactcaggtatgattgtgattaatgaacgtcatggagtaaatcgtttgggaattcaaggtggactgagatgctacttttaaatcgttttctataatcggtggttatgtctttttaaccaatcatatcttacagttctttcagcccttgtcaactgccctgttcatcggccttccggctgaaagtatttcctgaaaggaaagattctttgctttcagctttcagccgatattgtaatcatgagattcttcatgcttaataaatgctatttcattagaaactttagtattggaaaattcacgtatttcactgtattggatctatagatggaaggtgttggatctatagatgggagacgttggatctatagatgggaaacgctggatatatagatgcgtcattgaattttattagatagtatttttcagtaaatatcattgcttgttttggggtaaaagaagcaatgataaccattaaaacattgcttcttttcctgcgcgtttttatgcacagtgactattctccttgtcaacttgacccttgtttcactaaagaagtattggctgaaagctgaaagcaaagaatctttcctttcaggagatactttcagccgaaaggccgatgaacagggcagttgaggagagctgaagagctgtaagatgaaaaacaacttttcttgctgaagtaggtttgttaccactgttaccatataatattttgtttttatgtgaaagttgtggttatttgaagcgtcaataaaatcttatatcacatgaaaacaacacttctacttttaagaattcaaacatctaaacggatagttgccatatttctgctattcgtggttttatctatgtgggctgctgctgatgcatacgctcaaaacaaaatcaagtatacttacgacagtgccggtaatcggttgtctcgccaaaaggaaattgtggttcagacaaggggagtcttgagcgatgatgaaggagagccttccatatatgaagaaaaactttcggaaactaaggtgacaatttatcccaaccctacccgtggtatgctcaaagttgatatttcaggagttgagaagtttgagaatgcccgaatatctctctatgatcttaccgggacattgatgcaacaatggggcagtatatctcagtccaatgcggtagatatatctgatcgaactccggggatgtatatcatgcagatagtctataatggtaataccagtagttggaaaataattaaagaataacctaaagctaatacgctattatgaagagaagaatattttttatcttggtactgttatgtaccttatcaggatatgcccaaatctcagtaggccgggattctcttgttatagatccattaaaagatgaattcatgcaagaagctgatgaagacggactgtataaaatcgtgacagaagtcaatgagttgtcgtcggaagacagtgccgtccgaagtgaagttctttcgttagacgcccctctcttgaagcccccgttgaaaccattagatccatttgaaccgttagaaccgttagatcctcttttgccggcgcctccatccctgcccgaattgccaagcacggtagagatagaccgggcaaaagcagtaggtgaaatacctattcaatcgagaatagaaaatggctcactcacatacagtgtacctattgaaatatatggagggaaaaacggacaccaacccgctcttgccttatcttataatagtctgatggggaatagtattgccggatacgggtggtgtataggaggattatcctatatatctatttgtaattcaaactattattatgatggaagcaatgcaaaaccggctagtttagataagaattctgcctattcattagatgggagtcggcttattaagatatcagaaacgtcttctcaaatcgattatcagacagagcacggcaatgtgaaagttacattttatgcaccatcaggaaaatactattttgatgtttggtatccggatggaaagaaagtaactcttggatatcccaccaatacatcggcacaaattacttacccgattactaaaagtgtagatgcattcggagggtatattgattttacttatctgttggataataacgtctattatgtcaccgagatcaaatatggcagcaattctactcaatatggtgctgtaaagtttacctatcagacaagaagcgatgttcaatcttcttatatagcggggcggctgatgaaggatagtaagttattgtcgaagatagatacatattatcaatcatcaatgcttcttagtacttatacgctgagttatgacacaagtatatatagcttcttgtctaaaatcagtcttaaatcgaatggcaaagaagttaatccgctgatgttctattatggaggtgagtctgacgaaagtcgtttccagacaagcacggcttttcttgaaacttattttgctaacagtaaggctcctgatcttatcctgcataagggtaagtttaattctcttacccggagtgaaggactcgttgcctatcctaattttgaatcttatggtataaccgcttatgataaaaaaggaaattaccagtatggaagtaaatatgatcctgcacagaatctgttggtttataagaatctcggagattacctctgttcaccggtaaagattcaggcaggtaatggattccagaaattatatcctgttgatatagatggcgatggaaatgatgaactggttagaattaattattggttgcatgatcagaacagcgccaaagtagatattactacctatgataagaatatgacagcccggaatgcatccttcttattagaaggaacatttgcagaaggcagcaggcaaagtgctgttcccagattattcattaccggagatttcaatggagatgggaagatggaattggttgccgtttcgggtaacaaacttccgaagggggaaaccaggacatggtcaagaaccactatgtttaatctggaattgaggactaagatatatgatcaaactccattcttatttgattattttaaggatgcgctttttgctgtcgactataacggggacgggagaacggacatttgcctcataaacggaattggaacttatatttactcatatcagggaggtgcttttgtgcagattgcatatacaagcggcattaagagcacagatatatcgggtgcttccaaaagagaattgttggttgaagatattaacggtgatgggctcaccgattttcttttaggtccgaagaagaatgattactggattgaaatgaaaaaacgcccttgtggtgaatgtagtggctgtagaggtgagattattgatgatccgataataaaggatcccttcctccctaataatggtggtaaggttgatagcgataaggcttttgaatttaccactccgtgtatcagacccatttcttatccggtaactcactataatagtacgtataaaacctggactgctttattggcaaccggtagtggatttgtaagcagcacatttgagtttttatctaattccgataccaattatcagtttctgtttcatgatctgaatggtgataaacttcccgatttagctgtaaaatcgggaactcaaatcagtgtacatctgaaccagaacggtaaactgaatactgtggccgaatctgcaaaagtgactgtagattctgattctcattttataacaggaactataggagatggttatagttgtaggaccagccaattgctaagtattaaagatgccactgtcactccaatttcctttacacgtaatgatgcccggggaagaatgctgaccggcatgattaacagttatggggtaattgagaaatttgattatgaaaatcttactaatggcaatatgtattggacgacatctggttatagtacaactttcccatacaataaattatatatgaacatcaatgttgtcagcaatacatattctttttatggcaatacgtatttgtcttctaaatcatactattacaatgatgccgttacacatcgccaaggattaggattcagaggattcaggaaaattacaatgcatgataatatgaaagggactcaggttgaactgacttttgatccaatgaagtttggagttataacccagttagttaatcctatgtctgaagcttcttattattatactgtatctattgcctcaaataaggtagccaagatagcattgagcaataaaacagaaaaggataaattaaagaacacaactgttagttctaattacatttatgatacttatggtaatgtgacccaagagacggttacttacagtgacggccttatagtaacaaccaacaactcttaccataacacaaatgatgcttctacttacaggataggttttctgtacgatcaagtaaccacaaaaacaagagatggctcaacatgggttgacaggaaatatatacctgtatattctaatcagcttccggttgtaaaagtacactatgcaaataataaagcgatttctcaagtcaactattcatatcaagatgggttggtatcccaagagtctttaagagaatatgcgtcgactaccaatctaattacaaagtatgaatatgattcttatgggagggtaataaagaaaacagatcctttgggattgattgaaacatatacatacaattcaaaagggcaactgtcctctatgaaaaatcataagaaccaggaaaccagcttcaactatgatgattttggcagaaaagttaagagtgtcaagcctgatggtgtcatagaaacgacttcgttttcatgggctacttctccggctttagctttatggctttccactatttccgttacaggttctccggtatctcaaacttattacgacgcttggggtagggaagtaagaacaggaaaacaacgttttgatgggaattatgtttatacagataatgtatatgatgagaaaggaagtttggctaaagtttccatgccatttaaagggagtgcgcccgcacaatggaacgtatatacttatgatgcttatgacagggttgtatcattgaaatatgcctcgggcaaggaagacacattttcgtattccaatacgagtattacctcagtggtggacggcgtatcaaaaacagagaaatataatgcttccggagatataatatcagttaccgatcccgcaggtactactacttataattatagaccggacgggcaaatgattagcgtagttgctccggggcagattacaactacattcgggtatgatgattttggaagacaaactacaatgaacgatccgagtttgggcattatccgatatgcttatgacactatgggaaatgttgcccaggaaactgacgccaatggaaatgtcacgaagaaaacttatgataatttccatcgtctgattaaaaaggaggttgccggacagacaataaactacggctataatgctgacaacctcatagaatctgaggtaagttcaaacgggacgtccaaagcctatacttatgatgctctgatgaggctaagtactctgaaggaaacgaatgtggatggaaagtggctcaaaaaaacatttactcacaccaatgggcgtatatcggatctgacgtatgcctccaatatcggtaatattgtgactgaaaactatacatattcttatggtaatctttcggaagtgaaacttaataactcgacatctatctggaagttaacttctgaaaatgcgttaggattgacgaccggtgtaaacacaggaattttaacccgcacctattcttatgacgcgaacggggctccaacaggtagagtagttaaaaatggttttacagttattcagaattccggatataactttaatgccaagacgggtaatctgaactggagaaaagacaatgtaaggaacattcaggaaaactttggttatgacaatctgaacagattgacaagttttgccggaaaaacggctacttacagtaacaatggaaatataaccaatatatctaatgtaggaacttttacttacaatgccgaaaaaccttatgctatagcattgattactccttacggcacggaagttccacttcgggaacaacagattatttataatgttttaagaagaccggagactattactgaaaatggttatgtagcaacatttacatataatggggaaggcaatagagtcaaaatgaatctgaagaagaacaatcaggtccaactcaatagatattattggggaaatcaatatgaattcgagacaggagttgcgggttcaaaggaaattctgtaccttggcggcgatgcgtattcagcggcggcagtgtatgtgaaagaaggttcaggggcttgggttgtttattatctgtgcagggattatctgggcagtataactcataccgttaattcttcaggtgggttgaagcaggagctaagttatgatgcatgggggaggttgaggaatcctgctaaccaaactttatatgcggttggtgcggaacctacgttattcttgggcagaggttataccgggcatgagcatctgacagcttttggtttaattaatatgaatgcaaggctttatgatccggttattggtagatttctatctcctgatccgcagttgcaggaaccgtattcgagccagaattataacagatattcttattgtttgaataatccgttaaaatataatgaccccaatggagagttcatttttggtattttcaattttgtgaaagatttatttgtaaatactttcataaagtcctggtcgaaaggcattaacgcatggactaaaaaagagaattggcgttccacaattaatgcctttaaacttgatcttggtttgtttaagggaggtttctgggatgtggtgtcaagacttacatggcaattagcgcaaacaggtttgggtaatttggtaaaccaagttctgaatacttgttatctcgttaatgaagtgaactactttgatggtgcggtagtgattgattctaaaatagatgtggggggaatgacattaagtaattacatattgggccctccgggcttcaaacctgattttagagatcatttgtttgtacatgagtatggacattatttgcaaagtaaaaaacttgggcctgcatatctgtttgttgtagctaagccaagtcttttaagttcgacatttgataagaataaccatggtaatcgatggtacgaaactcatgctagcaaattggcggcaaaatatttcgacaagaaatatggtacgggggcagaggcgtatcagaattacttgaatgaaggaaaagatccctataaacaagaagatatttttaatgtggatgtgttcaaaaatggaggtagtcctgcgtataatcatccaagaggacgttcttataaagaacctcatcctgccaagcctaaatggaatggttggcaagacatattctttttctaaaaatgcaggtcaactaattaaataaatagaagatatgaagtatttaaaattttcactaattgctttaatcccttttattttatggggatgtccagacagagatataccattcgattcaactgttatatttataaataactcggataagacattgctggattattgtagagataattattatcctgatactacaatacaggttgagggtaatgtttttgatgatagaattaaaaaattcgctatagccccccattcggttcgtagaaagcaaactagttggaggtatgaaatgaaacagccatattctacaggtgtcatgacaatctttctttttgacatggctgtcgttgactctgttccttgggagaagatccgtgaagattatcttgtagcaaaaaggtatgagtacactcttgcacagcttgatagtttgaattggacaatcgtatatccccctgaagagtgagtattatttattttcagtatggtttagaataagagattttatcactatcattctaaatttgtatacgaaatatagtaaattcttgaacaaaaaagatggaaatatgaaactgataagcaaactactactaatattgttaggatgttcttcctgcgacccaaatacgcatgaatttggcttcgaggtgtataatcaatcggatagagaaatagatgtgtgtttaaacatgtggtatctgggtatccaagatattttagtacctgcctatcaagactatgatgctacatcccaatataattatggatttacaaccgtggaaaagaaatcagtaaatttatttatagtacctggttcaattactgcagaagagatttttagaatgtctaatgatacgatacgcatatttatttttgatgctgatacgcttgcaaaatattcttgggaggaaataagtcgtaactataatatcttacaacgatatgatttgacgctaaaagatatggaacttttaaaacatgatatctattatcctcccactcccgctatgcgtaatataaaaatgtgggctccttatagcgagtaggcttttctgaacgcaactgtgatgagtgttgatggaatttattataataatcatcgagtaagatagatatgagacgaatgaggataatagtattgttatgtgcatgcatccttctatgtgcatgtccaaaacagccgattcagcgttatataacgttggtaaataaatctggtaaagaaatagtttgtcagcaattgtggtgtgctactataacaaatgctgacactttgtatgaatgtagaattccgacgcaaggcattttagctaatagttcatatctctatgaaagcaaatacggatgggagtcagaccttggattccttccgtatatacagtatttggtattggatgcagagaagttccatgagtatcgttctgctccttgtgacactattcagaagtatgttcctgttttatatcgttaccaactcaaattggaagatttggaacagatgaactggacagtagtttatccccctgaaggtgagaactgaaacattaaactaatacataaaatatgaaaaaacaaatcattctattagcaatcagcatcttgggagcattctctcttcatgctcaggagataaacgagggtctggtacaacccaaacaagaggttatctcacaaccacgtaagggcacggactggaataaacaacctatcggttacgtttttgcaggtgcaggcataggatatattccatcggtagaaaaggttgagggactggctgcttctaattacgttacgggacttgattggagagtaggaatgtctcgttactacaatcgttggggatggggagtacttgtacagcaatttcgttccaagcaatcagttgctttctatgatggtgtacgtggtatggttatggatgatatagggcggctattgtatattgcccctcaatttaccggtcgatggattttaggagagaaactaaccatttatggcgcaatcggttgggggtggctgcgctataaagagacagtgaaaggaagcggattgggggaactcagtggtacagccaatgctttaggtggaaatttcacagtgggtcttgaatatcgtttgagttcggtagtaggtatgagcgtagatctcggtttaataggaggcgaaattgggaaactaaaagttgacaatactgggctgcaggcagcaattgatgagacatataccggcaaaatggatgtcacccgcctatatgcaacggtaggggcacatatttatatctggaagaaaaagagataacgtcttctatctggataccgggttgctttatttgatgtttaatcatgccatgcaaaacattttcctcaactaaaaggttattaatatggtatggtaacaaagatactatttatttataatttgtcattatctttgtagtcatatcatattaatgatgtcattgagttaggaagctacacttttgaattgattaagaatgagtaatattttgaaaaaactattctccatattggggaacgatgaaagtaaaccggactttcagacttgctgtacccctatggaggtatttgataaacagaaagtaaaagccattgtaaaacagtggcttttgttcattgctgaatacgaaaccctgcctaatgacatcattgcattgaacttcaacttgtgggaagctgtcgaagaaaatgggcagagctgctatacactcgaactgacaggctctaaacaatatgacgcggaaaatgatgactgggcttgtgaagaagatttcgatccgagagaaaggaactgtgacgctttgcaactttccagcgaaatcccgtgggaggaagtactgaacggcctggtggaagttctgaaagagttaaagaaagaactgaaagtaataagtctttttcaggtgaaacatataacagttgggtttgcggaaggcgatctgatagttataaaatagaaaccttccgcaatgtgctgtaaacagacctgattctaaggtcgtgctacttgaagaatgaactgggcgtttgcttatattgtttcacaaagcaacgggtgaagtacttgggatcattaaatcccacccggtaggctatttctgatacaatgacgttattggtgctactctctaatattttcttggcaatctgtagcctgtataattggatgaaacgtaccggcggaagtccggtgagtgatacgaatttcttataaatcactgtataactgatgttcagcctttctgtcagatcctttacaccgaattgaggatcagcatagttcttttccagaatattcataacttcgttcatgaactgctggtcgggctgtcccacttccagcaggataggattcaagtcttgttctacgaatttcttctgacgcaaatccctgttcttcaagatggagtctatgtgggctaataatacggattgttcgaaaggcttggtgatatatccgtctactccgttttcatagctttctatccgggcagtctcacttgaatttgccgtgagaagcaggaaaggaatgtgacttaaaagcttgtcctcgcgcagtcttttgcagaagtcggaaccatcgcatacgggcatcattagatcggatacaataaaatcgggcacgatattctgggctgtcttatagccttgctcaccgttgtttgcttcagcgatattgtatttttctttcagcatattcttgatataatgacgcatgtcgggattgtcttctaccaataacaaagtcggcttgctcctgtctataggaatgaacggctcgattttgtcttcaacgggtacgggctctttatattcctcatgaatttcattctccgctgcgtccgccagcgtaatggggaaatataatctgaaagatacaccttctttttccgaactcttgactttaatcgttccatctaataggttgataagctcttttacgatgtgaagtccgatgcccgtactgctctgtccgtagtttgtatatttgttctgttcgggtatccggtagaaacggttgaatattttgtctatttcgtcaggagctattatgctgccactgttggtgacggagataaactgtatgagtttgttcgatttgtcgatgaattggttggcatgcaatgtgatttttcctttatcgggagtatgcttgatggcgttggataatagattgaacagtatcttatgcaggttttccttatcagaatagatatggtcactcttcagacggtatatcttttcaaagctgatgtttcgttctttcatcaggttggaaaagtcggttattgttgtgttcaggaacttgctgaagttgaattgagagtaattgagcgttaagttctgggtatcgatcttgcgcaagtcaatcagttggttgaccagtgaaagcaggtattgagcgttccggttgataatctgtaagtcctctttttctttgggatcggtggtttgcctgacaagctggcttgccggtccttgtatcagggtcaggggtgtcttaaactcatgtgcgaggttggtgaaataggatagcttctctttgttgatagcctccatctgctcggacatgctttctatcttttctttcagaagtttctggatatgttgttgccttgcattataccaatagatgatataaagcagaatggacactatcaatatagcgataagtgagtagaaccatcctgttttatagaatgggggatgtacaataatgctgagacaggtggcttcggtagaccaggtgttgtcgtggttggtgcatcgtatttccagcgtatattttcccggcggcagattggtgtacttggcgtttctctttaccaatcctgtgttccagtgctcctccagttcatgaatgcgatggaagtagaacaccttctcctgttcgatataatccaggcagctgaatgtgatttcaaaggaattctgtggtggatataaatgcagttccttggttgttgagatacttacgggcagattgtcgctgttcagataaggtatcagctggctgccgttacagacaacgctggtgagggttatcgtccgttgcttttgcttgggcaggtttaccagtgggctgaatgttacgaaaccatcgatagttcccagtaacatattgtgattgatggtcttacagccggatcttttatagaattggggtaccagtaatccgtctccttcgtcgaacttgaaggcccgtttggtattgatatcgaagaagtaaatgccttttagggtactgatccataagttcccgttctcatcgtccagaatgttcgagatgctggtgtccgaaagaccgcagcgtacggcatagttcttgaaggtatatttttcgttgttaccgttgtcttccaacaggtagatgccatttccgaggctacccagataaatctccccttttttagtttcgaatatacaagtgatcttttcattgattttgctttcgggatcatccagtttgtgctgatagtatatacattcgtaggtattcctggaattttccaggtcgatgacgtacacgccgtttccgccaatccataatcttgactgtgagtcgatgaagattgtattcatgttatgaacgggttccttggactgtgtgtagaactttagccgattgatagctcccgtagagaaatcgagtgtattgatatggctgccgctgcatatccacagtgcattccgggcagagtccagggctatgtcatggatgtcatcggaggtcagggaggaattcaaactgttgtaatgttcgaatacgggatgtgacagattgtttttatccagtttatccagccctccgcctattgttgatatccagtaattgccatgcaggtcctgaatgatatccgagatgttgttgtgagccagtgagtgcggatctcccgggttgtgtttgaagagcgaaaaggagtcagcacctttcctcttaatggcaagtccgccatctacaattcctgccaggatgtttccctctttgtcttcgagcactgtgctgatgatgttgggtactcctttctcatacccttgcagtgaataattgaaagttatgcgttgcggagccatgatattaattccgccgaagtcggtccctacccagatattatcattcttatcaacaaatatccggttgacgatattatcattcagggaccgggcttgtatgcctctgctgaaagtaacgaattggtcatttcgctggtatatgttcactccgtttctggttccgataatgatgtcgcctgatgaatttttatcaatatctgtgatgaagttggaggaaatgctgtgaggattattgggattatgctgatagagtatgcagaactgattctgggtgttatagcagtataagccactttgggtaccgatccacagatagtcaccatacgaaaacaggcggttgaagattaactgtgaagtatctaagtttgtaattacggggatattgctgtaatcctgtttgcccgaaggagtgaaatgcaataaacacttgtcgcctcccgcccagatatcactaccgtgttttacgatggttttgatatccacatctttcttcaatatccggatatcttttatctgcctttcttcgttcagaatgatgtaggccagtccgtcacttttgcctacccagagattattgaaatcgtcgacaagcagggcctgaacgggagagtaaagcacattattgttcttaccggagtattccttatagaaattgagattttcgtgaaggagatcaatgctcatgatgccggcttcggaagctacccacaaatagttgttgtcgtcttcgtcaatgtcattgatgtaattactttcaataaactgatacggttgcctgggagctgtggagtagtgtttcagttcgtaaccatcgtaacggtcgagcccgttggaggttccgaaccacatgaatgagttgtgatctttgtgtatggttcggatagagttgtcgcataatccgttccggatagtaagataaaggtaattgtattggtttggattatcctgggcaagcgctaaaccctgcccttgcaggaagcagagcagggttgtgattagcgctattgtcttcgtatacttcatatccggcatggagatttagttattgaaaactgatccagtcgatttcaactttaccgcttccttttagagacacgtataaatcgtggataccggtctgagcggaacgaaccggggattcaatatttgtccatttatcggttttgggaacttttatttccgagataaccggaccatttgttccgtttatacgtatttgcagtgttcctccgttgtccgaggttactcttgctttcactttccggggggtactctctccgaagttcacccggttgtactgcacccatgcaccgtttttgctcaataaagttttccagccttcgaatttgtttgcctggttcaggtaatcgatggccgctccctgattgcttaaccggctgtagcgatccagttgaatttctttccgggcatctgttatgcccactccgcgcagggtggggattactttttggatagtgccgtccgggttgaagaataaggaatcgactcgtgccgatctgtttttatcgaattcgggggagtaatcgttgtggtgatagaacaggtaccactggtctttgtattccaccaatgagtggtgattggtccagcaatcggttggtgattcatccataatgatacccttgaactcaaagggacccatgggattgtctcccatcgcataagccagaacttccgttttttcctttacccaggggaatgtgaagtaatattttccgttgcgttcaaaggcgaaaggtccttctttgaatccttcgggtaatccttgaatttgcatgggttctgaggcgagttcaagcatattgtctttcagttttgctactgacattccgcggcctgaccagtatatgtaggcttgcccgtctttatcaatgagcacgcaagggtcaatgccattgactccttcaatgggagtggcctgcggggtgaaagggccgtaaggcttgtcggctatggcaactccgatgctgaaaccgcgtttgccttcgcctttaggggtagatgggaagtagaaataatatttcccattcttgtatacacattcgggggcccacatggaataggagtcaggagctacccaaggtacattttcctggcttaggatcactccgtggtctgtccagtcaaccagattgtctgacgagaaaacatggtaatctgccatacagaaccattctttcagacgctcgatggggctcggaatgtcatgtgaaggatagacatacatcttgccttcaaaaactttggcggtgggatcggcagtgaactgatccgtaataatggggttctgagcttttaatgtacctattattaccagaaatgcggataataaaaatagtcttttgtttttcataagctaattgtttttttagtgcgtacggacttttatttctttatccggacacaaagataaaataaaaatccgttggcggaattaatttctttctatcgggttatgaatcaattcaccacagattaacacagattctcacagaattttatttctctgatttttaattaattaaactctgtgagaatctgtgttaatctgtggtgagcaaattcattactatcccgtaaagtgactttgacggattgcagatcccgggctgcggaactcgttccatagaataactcgtattcacccggtgccacacgcatggtatttgtagaaggatcaaaacattcgaatgattcggatggcaactctatcttgacatcctgtttggctcctgctgcgagttctacacgtgcataggcttttagggactttaatggtccgtcagcatcatctgttttgcgtatgtaaacctgtacgacttcagttccggagcgcttgcctgtgttggagaccggtacagtcaaggtcagcgactcatctgtacggagttgggttttgttgcaactggctgtacctacggcgaaatccgtgtaacttaatccgaatccaaatgggaacagagggtcggacatataccggtatgtacgtcctttcatggagtaatcctcatagtcgggaagttgtttcgtacttttgtagaaagtgacgggcagtttgccggaggggttataatcaccaaacagcacgtcggctacagcatatccacccagttctcctccataccatgcctggagaatagcgtcgcaactttccgtttcgggcagcaatgccatagacgatccggaacagttgacaaatactacttgttttccggcatctttcagagctttcaggaagtttcgctgtacagcgggtaattctatatccgtacggtccccccctttgaaaccgggaatattcacgggcatttcttctccttccagttgtggcgaaatgccacctacgaagaccactacatctatgcctttaagtttcgaaatgctttcactataattgatcgggaattctttgccgaggttgaacttcaggtttgcagcccagttttctacttgtgcatagagtatttctatcttatactctttccctttctccacttgtagcatggtgcgggtatcggtggttctccaagtgcggtgtttagtcatcgacttgccgtttaccaataattcaaagtaactgcaaccttcgagattgaggagaatttcgcctgattccttcggagttaatacggtttcgtatttggctgagaacttttcaagatttactccggggccaaaagtatgtaatccgtatgtagttacgttgataggctgggtggtacggagcgaagagacaggctctccctggcgttccggattgttccagaatgtagcttttatgccgggtttcccatctatgctgcattggtcaagataggattccaatgtttggtcattcaccaggtcacagcctttcatgtagacgatctgattctttttcagtttacttttgaagccgtccaggatggtaatggtctgattcggagttccgttgtagttgccccacagcataggtttgtcatcagcgttaggaccgataactgcaatcttgcggatggatttacttaaaggcaatacattgtttttgttctgtaagagtgtcattgtctggcgtgacatattcagtgacaaatctttgtgagccttacagttgactaccgacatcggtatttttgtccagttcactaatgacgggtcgtccatttctccgagttcaaagcgtccttccatcaggcgaagcacatgtttgtccacttcttcttccgttatcaatcctttggatacggcttccggcagtttctgataagcatatccatatccacattccacatctgtacctgccatggttcctttgacggctgcatgtacggcatcggaggaacttttgtgggaagtccagaagtcggcaatggctccacaatcggagactacgagatatttgaatccccactcatcacggagtatctgttgaagcagacgggtgtttccacaacaaggatcatcgtccaggcgctggtaggcacacatcacttcgcgtacatcggctttttgtaccagtgccttgaacgcaggcaggtaagtttcccacaggtcgcggggactgacgttgttcagattcgcggtatgacggctccattccggaccgctgtgtacggcataatgtttggcacatgcaagcagtttgcgatacttctcattttcaggtccctgcaatccttttaccactgcaatacccatttgtgaagtcaggtaaggatcttccccgtaagtttcctgaccacgtccccaacggggatcacggaagatgtttacgttgggagtccagacggagagactgtggaaacggacgtcctccagtccgttgcgtacgcgctcgttgtgcttggcacgcatttcatcggagactgcattgaaaatgtcgaataccagtttgtcattgaatgaagcggccattcctaccggttcggggaagactgttacatttccctgattggctaccccgtgaagggcctcactccaccaattgaatttctttattcccaggcgtggaatggcttccgaatcatcacacatcaagagcgctttctcttctaaagtcaagcgtttcactaaatccttcgctctttctgccggacttagctcgggattctgatacggtaatgtttgtccccaccccgatagggagaataacaaaccacaggttactaatacctttttcataataatgttgttttcatggtataaaattatgtttttatttcttggttgctaaggatgatatctccccagtattttaatttcatctcctgaaatatcggcttcaaacagtgtgggtcttcgtggacccgggttctcggagtcgaggctttggtgatgcaggcacatcagcaactttccatcgaatgtacggaataacataccatgccctgaattattaggtatcagaggagtattgcactgaacccaggggccggcaagtttacccgacccggaataagccactccctgcgcacaacggctgttgctccaactggaccacaacattcctaaacgtcccgtacctgtccggaacaggaacggaccatctgccacatagccttccagcgccatgccgaaggtgagttcacctatcgatttcatttctcttggccatggggcatcggatgctctgaaaagggtaatagcggttcccattgattctgacaggtccggagcaagctggatgtagttgatcattccgtttacggtttgcatccattcgtggcaaaagaccatataaggcactccgtcttcttcccagaaactaccgtcgagtgtagaccagtcttccggcagatagtccgtgccgctgatggggtggtagggacctgctgctttgtcggatgtaaggatatgggtggcacgacgttgcacattgtatctgttgggtacagtgtctactatgatcttgggattggtaaaggtgacgaaacaatagtatttacctttatatttatggagctccggggcccatatccttggagcggttccaatccaggaagttgtatccacagtaatgtattgatagggacctgtccacatctttagattcgtgcttttccataaactgccgccacttccaaccagataatacatctgtgtttcttcatcggccaggataaagggatcgcttaactgcaaagagtcaaaggaagtggtgtccatcttatctccttccttgccgccgataaatgtatattgctttaccggttccgggctcttagtctggttacaggcgaccagactaagaacgaacagagttattgtgaagtgaaacagtatcttcatagttgcaagtattgttaaaactacatctgtattatctgaagcatcatttgaatattaagcctgcaaattgatgcaatgaacgccgccaggtgagccattcgtgggctgtaccgggagactcgtaatagatatggttgatgtttgcttgagtcagtgcatcatggaattccgttacatttttaaagcgtgcggcttcttcggttcccaggctgatatacagtgttttcactttttgattgaaggcttcggcgtcagcaaaaacgccgttgtaggctgtattcagttcattactgttcatccttcctccgccactgaatccaccgatatgggcaaatttatctaaatgggccagcccgatgcttacagcctggaaacctcccattgacaagccggctatggcacggtgttccctgtcgggcaaagtacggtagtttttatcaatcatgggtatcagttcattgataaccacccgttcaaaagtattgaagttgaacctgcctttttgtcccgtttctttttctttggggtctgtagcatatcctctgtccatgactagcagcatgggaacggctttttggccggcaatcaggttatccagaatgttgtctgcctttccctggttcgaccatccggtttcgtcttctccgctaccatgttgcagatataatacgggatacttctgagtgttgttctcgtcataacctgccggagtatatacgaggcactttctccatgcctgagtgatgtcggagtagtacatctgtgtgcggatttcaccgtgtggaacgtgctgaggcaaatagtaatccactccttcctccggaatttcaatgccgcttgacatccggccacatccgtagaacaattcgctggaaggatcggctacggaacacccgtctatctccaggaaataatagtggaaaccgggcacttggggatcggaggttacttcccaaataccgtctgcattcttggtcatgggatatttcttcattaagtccagttttaccgagtctgcatcgggagcatttaccctgacggttactgataagtccggatttaccaccggataactgataccgaggatattggtcgatgccgataccggggcagttgcttctttttctttgggtttctgtgcacatccggtaatcagggaagcgatcagagttgtatataagatggatttcagtttcatagtctgattatttaaagataagaggtgtaaattgatagagacagcgccgccaggtgagccattcgtgggctgtgccaggtgactgatagaataggctgttgattcccttcttgctgagtgctgcatgcagaagttcggcattgggactttcttcttcaccgattcccagccagatgaacttgaaatctttattgaatgtgacaggatctttgaaagcgccttcgtagagtgcgtctatatccgtatttttgtctatgggcaatgctccgctgaatgatccgatgtaagagaataaatcccggtggtgcagagtggtttccagagtttgtttgcctccccatgacaaacccgccatggcacggttctctttgtccgtcaatgtgcggtaagtcgaatctacaagtggaattacatcttttaccatcatgtcttcgaaggcgacgaatgcatctaccgatgaacgggcattcggttgctgttcgggatatttgtttcctgcatatacggcatatccgcagttcatcactacaatcatcggtttggcttttccactggctatcaggttgtcgaggatggcactgatacatccttggttgggccaacctctttcgtcttcgccacctccatgctgcaagtacaggacggggtaacgcttatccggattcttctcatactcggcaggggtatatacgtacattctgcgccattcgtcgcatactttcgagtagaatctgcgggaacggactgctccttgcggtacccctttctgcggtaagtagaaatctactttttcctcgggcacttcgaaggcacttgcctggcggctcatcccgaagtaggaataggttgaggcatcagttacctgcaagcctcctatttgtaccgagtaatagtggaaaccgggcacttgcggagaagaggtgagttcccacgttccgtcctgtcctttttgcatttcgtagggacggtcgagaacgatttgtacgctctttgcatcgggagcttttactttgaaagtcacagttcggtcggggttcaccataggatattgggcatttggaatattggtaactgagggtattccctgtgcccacatcgtccctgtgataatggaacaaaatatcattgcgcttcccgtcttgataattgctcttgataatttctttcttttcattgttcgtctttttatacttttcaaaaaaactattcaaatattaatgataaccgcaaaagtagtatgtaaccctcttaaggaggggtataaaactgtttttgaggaggacttttcttgctggcagggcatttatgtaacacttgtgttacatttgcaggacacaggtgttctgtttgttcaacacaagtgttctacaaatgaaatgcaagtggcctgtaaatggaggaccggagaccttatttcagcaggttgttgactgcattcaccaggtagatgtagcttgctgccagatctattacatactcattctcgctccaaagaaaaggatagtcctccctgttctcggggaagtccggtttcaatatcctgatgcccggcaccacacctccgggaatgaaactgaagtcggcccggttgctcccgtaagccacctttttgggctgtgcgcctactcccgaaacaaaagacagattatggcacggatggcaaccgtacagatagttcaatcctctgtatatgtattccgggtttatcagctcgggatacgaacgatggagcaggtagttcgtaatacacgcctgaacaatgtttctgttacctgcccatccggcagtgctgatccttactccatacggattttctttgtctacttcggcaagttctccggcataagcttctaccaagggccttacttgcttcttgaacgcattatccatgaaaggaatcatttgtgcaatgacagaggcattccggttgaattgttccaaaagggtggggagcagctcgttcattcttgtcttgtaaccttcatagtccgttgagcgccagagttcgaaagcggctctgcattcgatggatttcatgaattcaggattgctgaatcgtccgctatacgtttgttcttcgggatttgcctggtggttgtgttcgtcgtcccagatgaagcgagctactcgcagggcttctttgctcagttccggattgtaatccttcaatgcacgcgaagcggctgccagcgaaatggctgtgccataattcatgtgcggtgtccggttggtgaatgcccaacggtcatcgggagtaccacttgtacgcccgtcggtttgcagactatccaggcgagggttataaaccaggttatctgtcttgtttaccgcatctcccaaatggcggtactgatataaatgagactcgttgattccgggaatagcataccctatcgcattcacctgcgctactaattgtagaacgccgtgttcaatctgttgcaatacatcgggtttgccgtcgggtacgtgtatttccgtatagcgtgtcttttggttaatggtggtttcatcgcggtttaccccaaagctctcccacaaaagggcgaaagcctgtactacggcatgttgtgatccggtctggatatcgaagtctcctgcatcgaaccatccgccgacgttcaggccggggatatgctccagtggtttgtacttgttgccggtggtcggtccttgtctccaaccgtcccaatggatgcggttgacgggagcttgcagggcatcatccagatgcgcggcgccatgccatacgcgataggcttcgcggacaaacatatgatccatctgtacagggaagaatacgtccagtgtcgggaaccatgctttctgaaacacatctgttgcgatggggaaaggtgctgtgcgctggttgccatattccagcatatagatgcccggttctgtgacagaggagaaatcaaattgaaggtaattgtagcgtgtgtacattccctaggttttgggagtgccggacagggctttgctgaggctgccgtcactacacaccttatataaagagacggtagagagtggcttgtcatttttatccagttccactacggccactttcttttgtgtggggtggtaacctacttgtgagtagctcactacgggtttgcgcacccagtcggattgggtctccgctgtgataaaccattcggctatcttgccggtctttcctgccggaagcagggtacgcacaacgaagtttccgttctgttgtttgttccttccgtcaaacaatgacaggttattgtcatcggtggtgcggatggtgatgtgtttcaacggttcgtccggtgcaatgtctatcagtttgccggtggccatgggagtgggttccacttcaccgttgatggtagtcataaagtcggccggagaagtggggaacagaccgtgcttgccgtctattatgtaggaatgaccgaagaagaccgggggcatgaattccatattcagtccagctatgccatgcaatgcttcgggtaaaggtttgtctacgtttacgctaaggtagaaaccgccgtcacgggcttcgcctgtcaacttgtattcgaagttgtattcgggatattccagcatgacgtcgatccggttatgttctttatccggtatacgctcgacgaactttggcaacttgtcccattgtccgggtgtcggattcatgcggacatctccgttggtagcggtgcggatgccgtgatgaatgatttctacggcactgatcttggaatcatcgaaggtagcatcgtataggttgctgaatacgaagaagttcaacccgcgtgtttcgaagtagttagagtcatttaatgccagatggctgttgcgggaaaaggaggtacttttcccgcaacaggtgaatatcaggcatcccactactcccatacaaagaatgattgcttttaatttcatactattcattttcgtaatcggttcacttatcaaataattaatcatgcgaatcaggagttgaattgattcatatcttttcagttatgaattaattcaccacagattacacagattgacacagattctattttactgattattagattaataaatctgtgtgaatctgtgtaatctgtggtgagtcttattcattcctataccgttataaatcaaattcagcccctgattcgcataaataactaatctttaattatttgcccatccgttaagctgatgaagttctttgtttaagtctataacatcttttgggaatgggaagtattcatgtttaccctttacgaagccataagagcttgcaggtaaattttgatctactgataaaggatgagtcaactcagcacgtagatgatgttcttttccatagtatggtgtaccttggatgaagaagtcgtcatacagttgcggaacctggtcaacgacagcatcctgacactctttagcaatgccccaacgaacgatgtcgtgaaaacggcaagtctcgaaccaaagttcgtactgcttttcatcgcgaagagtctgagttgtgagttctgtttcaggagcttctgcacgtttctgaatagcattcagatattttttaccttcatccaaattacctgtttcaagacaagcctctgcataaagcagatacgcttctcccaatctggcgatacggaatgatgcagagttatgagtgtcgctaatagtcatattgcggtcgttaggagattctatattcttgacttccatatatacaccatgtgcgaacaggccttctgtactcttgataccccgttttggatcttttttcttgtcggcaagagacatctcatttccgtcagcatcgaaatccgtttcccaaccgcagagtttagagtcgtataagaattcgtccggagtgaggaatgtagctttgcgacgcggaccgtcaccgtcattttgatacatcttttcggcaaacttccagttgatggcaccaccgccccaaccatcgttagcgccgcagatggatgcgcgagagcctaagcggtcataacgccagttcaatacgttgtttgtcatccaacggccacgttggatattaccccaaaaacctttatcaatgttaccgaagcagttcgcctcgaagattttttcttcgcagccgttaccctctacatggaacaggtcacggaaacgatttcccggaacaagtgcatagttgggagattcaaccaaaggcttaagattcttctctgcacgagccatatcaccggcgaatacggcagacttgcccgctacgaaatatgcaaaaccttttgttactttaaaagcaccttctacatcattaggacctttacgtgagtcaagatcatttacagcttcttcacactcggaagcgcaccactcaagcagagatttctggctttcgacatttgtaggtttgtcatcggcacccagcagtttgtcgacttttggaggacgctggaatgtgagagccgccatcatgtgacaataagcgcgtaatacgcgagcctctgcgacacaacgggccataaccgtacttgcggccggatctacatatgttattacaaggttacttgcataaatagacttatagtaacgctgatataattctttaagaggagcgttgcctgtatcatagcggaactcatcgaatacacgcatatccatgtggtcagcataatttgtaccggcagagaaaacatcatctgctgaataattgagtaaagtgaactgcggctgatagattccggcagacgaacatacattgtcaaggaactgcgcataagcggcagtcatagcatcaacagcatcttgatcggttttatagaagttttcagtagagctaacagccttctgctcgatgttcaaacgactttcatcgcaagatgtgcagaacagtgcggcacataccgcaaacgaatatatatattttttcattttcgtcagtattaatggttggtttagaatgttacattaagaccaaatgtcatcttgcgcattgtaggatatgcaccggcatcaagacctacattattaccacttcttgaagcaatttcagggtcaagacccggataagatgtaaatgtgaagaagtcatcaagtgacacgtaagcacgaaggttctctataaataccttttttgtgatagactttggcaatgtgtatcctaattgcaattgcttaatcttgaagtatgatccgtcaaatacaagagcagaagatgaccagtagattttatcacctgcaattgtgttaagactgggcatattacctttcttggcttcatcgtagaaatgcttggagatattgttgtagcctgtgcggtacataccgtagtagacatcgtttcctaccgtacctgtaccgaataccgagaagtcgaaacccttgtactcaagattgattgtaatgccgtatgtaagatcaggaatacctttacctatattgaattgatcttcatcacccggagttaatgtctcattgccttctttgtcaagataaagaggctgtccttcagagttcttacctgcatacttgtaaccgcgcatataccataccggcataccttgttcgaagttggtgtatatagtactgtttgcacctgatatacttccaccggagatacgtgtgatacgatcatcaaggtaagttacttcattcttcaatgttgcaaagttgcctgatactgagtaattcagtctgcctatgttgcctttataagttgcttcgaactcaaaacctttgttctgtacctcacctgcattgatcatctgtgaagatacacctgtctcaggcagacatggagcgtctacaagaaggtctttggtagttttcttatagtagtccatgctgattgtcaaagcatcgttgaataaacgtaaatcaagaccgaagtccaactgatcggaagtttcccaagtaaggttaggattagccaaaccgcttggcatagaaccatttgtaacagttgtaccgttgctatattgataccactggccacctgttgcaatagaagaagaatatttataaccgctaagtacgttgatattaccgttacgcccccaagatgcacgcagcttggcaaatgaaacaatgttatcaggaactaaatttttaaagaacttttcattgctgagtgtccagcctgctgataatgatgggaagtaaccccaacgtttatctgctggaagttttgaggtatcgaatgcgtcagcacggaaattggcttgcaggctatagcgatcgtcataagtatatcctaaacggccgaagtatgaaatgcttgaagacttacccggtgttccactgaatgtacgggaaactttatctgatacaagtacacaatccaagtaacggaaattttcttcgtatgaagaaagcaattcttcacctgacgcacctgccgtcgtgccgttactttcgctttggatgtatgacatacctgccattgccgaaatgctgtgcttgccgattgaagtcatgtagttggcaaagttttcccactgatagtataggccgttgcttgtagtctggctaatagagtacttggtatcacttacacgaccggtgatatagtaaggttctgcgtagctgtaagtattgccctgagtaatgcgagtaccaaaacgagaagtaaatgtaaagcccttgaatggggtcaggtttgcgaagaacgtactatgtacattgataccgccatttttattgttggcattcttatcacgctgtgcaaatggagtgccgccggcaagttctgtattaaagtatgaagtagcatacatacccctatcatcgccgtagaaacgatagtttgtagcagaagttccattctgaactgcgtcataaacagaacctgtggcagcgagatattggctgcggtctgtccagtgtgtaggagtcagaggatccattacaagaagcatttcaaaagcagagccgtaaccatattctgatacgctgcctctacgccatttctctatagaagtgttggtacctacctgcaaccagggttttattttataatcagcattaatctgagcggttaagcgttcgtagtagtcgtttttgccttttacgataccatcttgattaacgtatgtgaggtttgcaaaatactgccctttgtcattgctaccctggaatgaaagagagtgctgcttgctccaagaagttcccataaactcgtcgaaccaatttgtatcagtattttgatcccaattataatcgcgaatagcatccgacatggcagcctcgacgttatatccttgcatgcccatccagtccttgaattcttccgcattcagtaattgtggaacatgtccaagttggttcatggtataacgtacattatatgtgatcttgccggtaccttttcctcccccattcttggttgtgataagtactacaccgttacctgcttcagaaccatagattgctgcggatgcggcatctttcaatacttccatagactcgatcaagcctggatcaagatactggatgcttgaaaccttcaaaccatccacaatcaagagaggaccaatatttccggaattggaggaataaccacgtacacggatttcagcaccgctacccggagcacctgatgaattcaagatttgaatacctgcggctttaccttgaagggcagcggcagcatcggttgttgccaagcctttaaggtctttagagttaaccgaggcaacagcacctgtcaggtcactcttgcgctgaacaccataacctacaaccacaacctcatcaagcacttgtgtatcttcttccaaacgaaagttgattacgctacggccattgactttaacagtctgtgttttgtagcctataaaagaagcggtaagggtagcattactgttacttacctgaatagagtaattaccattgagatcggtaatacgaccgttgctggttccttcttcaagaatagccacaccgatcattggctcagaatcattggctgagacaacagtacccttgatttggatttgcgctgatgctgatatgcacgtaaaaaacacaagcacaagcataaacagaaaaggaatcttctgaattttctggactacatttttcatcataattagtttaagaattaataattgcgttttttattcatcattagctaccgctacaatagttctctagccatcatcatacatacatttcatagtttttaattatttaagattaatataaaaaggcaattcattttttaattttgaatcggcaagacaactgctgagtcgcattattaattcaaactgattgcctgagccgattcgttatttttgagtggaattacccggtaatagtactttagagtaatagggcttgttcctaatgatcgcggaaattccatttggaattgtcgctgttcatatcgaattcgccgagagaaggagtgctgtcacctacggataccagaaccaattccttgtcagttcccggcacttctttgggcatgatccggtaggtgccgtctgtcaattggtcgattcgccacagttgctcgggggcccccgtgaactcaggcactgtcacgacttccgcatctgccgtggcggccagtgcgcgattggttccttcaatcacaattttgtaataagggccacccagatatccgcctccatcgggtacggcagtaatggtccacttctgatgaggacggaacatataatcaccgattcttacgttgatttttccttgtggccaggtcccgatcacatcttccaacgtctgcgatttcaaaggtacgacgggcgtgtcatctttttcccagaagcggtgtctggtatattccatacgtacaaaatcaacggcaagttcaagggcataccctctacgttcggattcaatctcatacgttccctctttgaagacctcgccggcaacgggccagccgttcttccataaaagcgggcgtatgcccagtacactgcggccaccccggtcgaaatcggcttcaaagtggcatgacatcttctctactccgtcggctactttgaaaagcccgaagtgtcctggaccggtttggcggttacctgcggcaatcaccatcttgccaccgccttccagcatttttcttcccatattatcgacatatggccccgtcactttacgcgaacggccgacaacaatattgtaggtagagttcgggccatcgcagcaagtgccgtgtgttcccagaagataataccagccgtcacgatagatcagatcggttgcttcacagtcaatggcgatgtcgatttctttgttgccctccattcgtttgccggttgcggggtcgagttctacaagcctgataaaaccgaaatacgtgccgtaagacaaccacaagcgtccgtctgtcgggtcgagcagaagtccggcatcaatggcatcacaatcttcatcattcactgaggaggcaacttctataggctccgtatatttaaaatccggagaattggggtctaaggttttattccacatggttaatactttaccgctgtgtcctccaccgagtcctcctcctgtggcactgtaagcaatcaggtagcggtcaccgattttcacggcatcgggcgcggcgcctccgccgggtcttactccgccaccgttccatgtccagccgtcttcagatatcaatccgcctccacctgtgccgaaagtataatatttaccatcgcactccatgatagtggacgggtcgtggatgtatggagtgccgatttgtgcaattgctttttcagatgtcaatacaaacatcagggctgccgtgcccagaagtatagcttttgttttcatgatcatttatagctgatagtaatgttgttaacgggtgttccattctcattgaggaagcgaacacagaaatcactcattccgggaccattgatgatggctccgcgaatgatgttcttgcccttctttaaagtcagccggcgcgaaaggcagtcatccttgaccatacgtcggtcgcccgaaagaatagcagcctcctcaccgttcagccaccacatggatgcggagttggaacctactgacatccggatgttctccatgtcttcgggacattctatgactgtgactgcccagaacagcacgccgtacacttgtttcttcaggccggaggcgaaacggaagagcttcacgttgaacagcttactgtcgagcgcgtgccaggttagcttttgtttgcctactttcactttatccccgtctttgggcagaacggtgaattgattggggaaatactcggttgcaaatgcttcgcgaatgtaactgtcggtaaagaccgtgttggaacggttgggcttgtcgatgggttccagcaacagccagcgctggataaagccctcactgtcgggtgacatcgtattcgtggttgccggagaaaagtagtctgacaaccggggggacgcttcattcttttgagcatagccatgtaaacccatcatagccgcgatacaagccgccaacaatgattttcgatggaagatattcatcgttatagtctgttttattgattatccttaattccgcaacactattataacttaaactttttaagtacctgagcaacaaaaagttgcccaggattttgccatgtcagaggattcacttaatttagtgttgctataataatcaaacaaaacctcatcaggcatggcaaaaatacaaattaaatctgagaaactcactccttttggaggaatattttcaatcatggagcaatttgactccacattgtcatctgtaatcgactcgaccctcggtctaaggtgtagatcgttcggttatcagtacagcgaaatcatccgttctctcatgagtatctacttctgtggtggctcatgtattgaggatgtcactactcatttgatgaaccatctctcacttcatccgacacttcgtacttgtagttctgacactatcctcagagcgataaaggagctgacgcaagaaaacatctcatacacatcagatatgggaaagaactacgatttcaacacggctgacactctcaatactttactgctcaattgtatgtttgcatctgaccaactgaaggagggtgagatgtatgatgttgatttcgaccatcagttcatagagacagagaagtatgatgccaagcctacatacaagaagttccttggctatcgccctggcgtggcgattattggcgacttgattgtcggcatagagaatagcgatggcaacacaaatgtccgttttcatcagaaggacacgctgaagagattctttgagagatttgaacagaacggccttactatcaatcgtttcagagctgattgtggatcgtgttccgaggaaatcgtagaagaagtagaggaacactgcaaatccttctatatccgtgctaaccgctgcagttcgctctataatgacatctttgctctcagaggttggaaaactgaggaaatcaatggcattgagttcgaattgaactcaatccttgttgataagtggaagggtaaagcataccgactcgtgattcaaagacagaaacggatggatggtgtgcaggatctttgggaaggagaatacacataccgttgtatcctgactaacgactatgaatcttccgtaagagagattgtcgagttctataaccttcgtggaggaaaggaacgaatcttcgatgatatgaacaatggttttgggtgggacagattgcccaaatccttcatggcagagaacaccgtgttccttcttcttacagcacttgttcgtaacttctacaaggccattatccacagacttgacgtaaagaggttcggactcaatgcaacaagccgcataaaagcgtttgtcttcaggtatgtctctgtaccagcaaagtggaccaggacatcaaggcggtatgtgctgaatatctatacctgtaacaatgcttacgcggatgtatttcagacagattttggataacgcctacaacttatgggtatgatactgcgtattgcctcaagtcgcattgtggggtaaggggatattgtaggctgatttgggtgtttctgcctcaatttatctgccaattcagtaatgagaggacttgtacacgcaagaaggacgttgaagggcttagttgcggatttgaggattatacattatttcgttttaaataatagaggaacaaactctttcagacatctgcgccaggtcaggaactcgtgggcagtgcccggagactcataatagattgtattgattcctgcggcctgcaagccgtcactgaggttcttggttctttcgggatgttcttccgaaccgatgcccaggaagaagacgtgtactttgtcgttgaatgctttacggtttttgaataccccgccgtacacggtatcgagttgcttcagatcgatgctgcctgctccgctgaatccgccgatataggcaaacttatccaagttgttcagggtagtgttgaaagtaagaagtccgccccaggaaagtccggccatagcacggttgtccctatcagtcagtgttcggaaattggattcgatatgaggaatgatttcattcactaagatagcaggaaattctgcaccgaatctttttcttgcaccgtcaggagtttcacccggattggtcttgaacacctcgatattgccattgtccatgactacgatcattggtttggctttaccttcggcaatcaggttatccataatgaaattcatcttgccctggtttgcccaactcgtttcgttttctcccataccgtgttgcaggtagagcaccggatacttcttggtagggttcttgtcatattccgccggagtatagacgatacatctgcgccattctttgcggatatcagagtagtaccagctttggctgatcagcccgtgaggcacgttcttgatggaatagtagtccacacctttctccgggatttcaataccgcttacccatttgcccataccgaagaacggtttgccattgggatcggcggcacttactccgtctattataacctgatagtagtggaagcctattacttcaggttcttttgatacgagcgaccaatatccgtctgcctctttggtcatttcacctcggaaactgatttctactttctgggcgttgggagcgtgtattctgaagtgcacacgtctgtcctcacctatgcggggataatcagccccgttgatgttatgctcattgggagtggttcctaccggaaaatcttgttgctgggcattcatagtgaatgggaacactaacaaagaagaaaaaataagtttcaatacatttttcataagcattagaataaattatatataaaattaatgattcagtgaatttgtctattcagtggatgttgagcgtaaaattactatgctaatgctttgtgctggattactattttgctttcggggaggatttttttaggaggataagattaatccaccggatagaaagaaaaatccccttcctgatattgaataggaaggggattataacccgtcttttgccttatgtggaaggaaattggactcgtagtcaagaaaatacattttctgttaagtggcacaaaagtttcttacctgtggcacaaaagtttcttacctgtggcacaaaagtttcttgcctatgaaacaaatgtttcttacctgtgaaacaaaagtgcctcacctgtgaaacaaagtcaccttaactgtatgccttacgcttgcgatgtctccagcatattaatcagttgtacccgctggatagagaaactattgctttctttctgtacatacttcaataattcaagcccatcctgatgaagcttggatttccgcagcaagtcgtcggcttccatatcatcagatatcttcagcatagtcatggcggcaagttctatttttcccatttcgttgggatcgcctttataccggtctaccagttcttgcgtattcatacttaacagctcatcggtagggaagcctaatatctgccgggtcagaccgtcatattcagtccattcattccagcgatatttctttttcttgagcagggcgttcacaatcaaagaaatgatctcttgaatcattcgtatcaggtaatcttgtttaatcataattatctatgtttttaataggtaatggtaaatccggttaattgtttctcggagctttgacaattccggctttttataaagcagtactttgtgctcacaaaattagtgatatttttaagatatcgctgaaaatccatacctttgtgcgcattaataatataaggtatagcaatttccatgaataagataacttccgtatgcgtatattgtgcttcgagcaccaagattgattccgcttattttgaagcagcccgcgaattgggtactttgttgggacagcgccacatccgtctgataaatggcgcgggaggcatcggactgatgagtgctaccgctgatgcagtgctggcggcaggcggagaggtgaccggtgttattcctcactttatggtggaacaaggctggcaacacaaggggcttacggagatgatagaagtggaaaacatgcaccagcgcaagcaaaaaatggcggatctgagcgatgctgtcatcgcattgcccggtggatgcggcactttggaagaattactggaaattatcacttggaaacaactgggtctctacctgaatcctattgtcatcttaaacactaacggctttttcgatcccctcctggctatgttgcagcgtgctatggacgaaaactttatgagacagcagcatggtaccatctggcacgtagcaagcactccgcaggaagccgtcgaactgattcataccatacctgtctgggatagttccatacgtaagtttgcggcaatatgatcgggctcctgttgacatggatagcgggctttgagggaatacccattccttattctcctaagttggacgatgggatcacagtgctcctgttgtgctgctttttcatgtcagcctatgtattgtcccgcagtcgcaagttcctggtgcagttggtgaaggacttccttctcaatcgtgaacgaaccagcatctttgccgctaccaccgctacggatatgcgctatatgctgttgttgattctacagacttgtgtgttggcttccgtctgtactttcaactattttgttgatgtcaggccggagttgggcgaacgcgtctctccttatgttttgctcggggcatatctcgcactggctttgctttatcttttctggaagtgggtgacttactcctttctgggctggattttttttgacgcgagtcgtaccggtctttggatggagtcctattctactctactttactatcttggatttacccttttcccgtttgctttgttccttgtttacttcgatttaagtcttcaggcaactgtgataatcggtttatttttggtcttttttactaaaatattgatgttatataagtggataaagcttttttgtggcaatttatatggcattttgcttttaattttgtacttttgtgcccttgaaatcataccttgttttatcatgtatcgaggtgtgttacaactaaatgattatttgataataaatttttaggacgttgaaaattaagaaagtacttgtgtcgcagccgaaaccggcatcagagaaatctccttactacgacatcgcccagaagtacggtgtgaaaattgattttcgcccgtttattaaggtggaaagtgtatctgctaaagaattcagacagcagaaagtgtctatcctggattacacagcagttatcttcacatcgcgtcatgctattgaccatttcttccacctgtgtacagaattgcgtgtaaccataccggaaactatgaagtatttctgtgtgacagaagctgttgcattgtacatccaaaagtatgtgcaataccgtaaacgtaagatcttctttggtaataccggaaagtttgaagacttgttgccttctattgttaagcacaagaccgaaaagtatctggttccgatgtcggatgtacatacggatgagattaagaatctcttggataaaaacaagatacagaacacagaagctgttatgtatcgcacagtaagtaatgattttacttcagaagaagagtttgattatgatatgttggtgttctttagtcctgtaggagtgacttctttgaagaagaacttcccggacttccaacagaaagaaatcaaaatcggtacgtttggctccactactgcccaggctgtacgtgatgccggactccgcctcgacttggaagctcccagtgtacaggcgccttctatgacggccgcgctggatatgttcatcaaggagaataacaaaggaaaataattttagagttacgagctacaagctacgggctacaaatgtcatgcggaagcagtatgccatttacagcttaaacttgtagctcgtaacttatttactgcgaactacttgtagctcgtagcttgtaactcgtagctaagaatgcttaataccctgcacaagtccgaaaggctggataagaagaaagtcatcgacaagatgttttcaggcggcgcacgttcgttttccgtctttcctctgcgtgtggtatatctgccggtagaggagttggaagcgcctgtttccatacttgtcagtgtgtcaaagcgtcgttttaaacgtgcggtaaaacgtaaccgtgtaaaacgccagatacgtgaggcataccggaaaaataaacatggattattgcagacgcttcaggatgaaggacggcaacttgctgtggctttcatttatctttccgaccggttagtcgattcgttggagatagaggaaaggatgaaggttgcgctggcgcgtatcacggagaaggtattggcggatgttgccgttcagaaagccggagaaaatgctacgtctgctgagaaaaccggtagtgcggggcagtcatgaaaaagctgttttcatacttgctgttgcttcccatctatttctatcagaagtgtatttcacccctgacttccccttcatgtcgtttcactcctacctgttcgcaatatgccgttgaagcgataaagaaacatggaccgttcaaagggctgtatctggcaatccggcgtattttgcgctgccacccttggggaggttccggatatgatcccgttccataaaaaaaactattttctgtactattcgcatgataattcctgttgatatacatacacatcggcggcccctagtgcctggaacggctattgtgaactgtttccccaaatcgtttgttccgcaaacggaaggctggtattctgtgggaatacatccgtggtatatcgcttccttcgcagcttccctgaatgacagtaaggcccgttttgaagaattactggatcatccccaggtgttggctgtgggtgaggccggattggataaattggctgaagcacctttgactttgcagatagaagtgtttgaatatcaggcacgtctggccgaggaggcgaataaaccgttaatcattcatctggtgaaagcggtagatgaacttttgaaactgaaacagaagatacaaccggtgaaaccgtggattattcacgggtttcgtggaaaagcggctcttgcagaagaatatctccgacatggtttctatctttctttcggagagaaatatcaggaggaagcgttgtgtataatgccgtctgaacggttgtttatcgagacggatgaaagtacggtatctgtcgatacgctttatgaacgggctgccatcctccgtaaaactccccttgaggaactcaggagaacgattcgtaagaatgtaagcgaaatcttttttaggcaataagagttgttagttcagataaagagtcgtacttttgcaattacaaagtatatcaaatatttaaatagttaatcattcgatgaattttgtagaagaattgagatggcgtggcatgctccacgatatgatgcctggtacggaagaacttctggctaaggaacaagtgaccgcatacataggttttgatcctacggcggactcattgcacattggacatctttgcagtgtaatgatactgcgtcatttccaacgttgcggacacaagccgatggcactgatcggtggtgctacgggtatgattggtgacccttccggtaagtcggcagagcgtaatctgctcacagaagaaatcctgcaacgcaatctggatggtatgaagaagcagttgagcaagtttctggatttcgaatccgatgctcctaaccgtgcagaattggtgaataactatgactggatgaagaacttcactttccttgactttgcccgtgaagtaggtaagcatatcactgtgaactacatgatggcgaaagattctgtaaagaagcgtctgaacggtgaggctcgtgacggtttgtctttcacggaattcacttatcagttgttgcaaggctatgacttcctgcatctgtatgaaaccaaaggttgcaaactgcaaatgggtggttctgaccaatggggtaacatcacgacaggtgccgaactgattcgtcgtaccaatggtggcgaagtgttcgctctgaccagcccgctgattacgaaggctgacggcggtaagtttggtaagactgaatccggcaatatctggcttgatccccgatatacttccccatataaattctatcagttctggttgaatgtgagtgatgctgacgcagcacgctacatcaagatattcacttcactgtcaagagaggaaatcgaagccttgacagctgagcatgaaactgcaccgcacttgcgtgttcttcagaaacgtttggcaaaagaggtgactattatggttcattctgaagaagactataatgcagcggtggatgcgtctaatatattgttcggcaatgcaacttccgatgcattgaagaagttggatgaagataccctgctggctgtattcgagggggttcctcagtttgaggtttccaaggatgctgtgtctgccggtgtgaaagctgtcgatctgttcacagataatgcagctgtttttgcctccaaaggtgagatgcgtaaactggtgcaaggtggcggtgtttctctcaataaagagaagctggaagccttcgaccaagtgattacttctgctgaccttttggatgaaaaatatctgcttgtgcagcgcggaaagaagaattactacctgattatagccaaataaaaggcaaattagtagcaaataagaaaaaaggcctcgaaatatttggatatttcggggcatacttttatctttgcaccgctttttaacagaaagtgcataagtttggactatggtgtaatggtagcacaacaggttttggttctgtttgtccaagttcgaatcttggtagtccaactcaaagaaagccttggaagagaaatctttcaaggctttctttttaatataatcatcctgatagatctttttttgggatcaacgtaaaaacctgagggttttcttttttaagcatacaacatcgtcagtctatataaaaagaatgccttatcttttacccctctgaactgagccctgaacgctttgagtttagcattgaatgattccgccgctgcattggttgccctcctttcaaagaaattgataatattcagatagtgggtctgaatggatcgtgccactcttccgaaagcaagaaatccggatttatctacctcatcataccatcttgcaagtctcgtcaaggctacatccttaaacttacactgatgataaatcaggcctaaacgcatggccagataatagcctttcttaatctccggatactctttaaacaggatatcagcccgttctctttgagactgggtccacaaggattctttcttgtaaagaagatagatgcttcttgccagcagctgcttccgcgtgtctccattagagaaaacgggagcgtgatatatcctgccacaggcttttgcataggcaatctgtgtggattcttcatccaaagcctcccagcgtgctttcacacgcatctcctgaacggcttcataagccagtttctgtacgtggaaacggtcggtaacccgtttggcggcaggaaaacagctacgggcaatctgctccatattgggagccatatccaaggttatctcacgtacttgatagcgacgacggcgggaaagtctgagtaagacagaacttaccgtacagacatctgtgccttttattatggcgataatactgcctttgccaccatgggcagccttgttggtgagtatggtatagagctcaccacgcgaaagggcaacctcatcaatacagacgtaagcaccgatattcttttcaaaaagcagccaatcctgtgcatgagcaagctgatcccagtgaagataaccactcagatgattgcggtattgacgctccagaagagctccgtcaataccatacagagtgcccaataacttacagctaaccggataactatcaatatagctcttttaaaaaagacgcaaaatcctgcgtcatacgggtaccttcagcgaccatacgccagttgcggctgatgtactcattactcttctttaaaatccagcgacgacgacggatattcaggaaaagtttctttccccgaagagggaagtcttgaacaaccacaggatcatagaatcctttgctttcggtttcttggctggaatattgctcaggaacgacattcttttcttcaagataaataacaacctcactagaggtttcctgcacatctacaagatcaaagtaatctaaagttccttcaggaagcagaaggcgataaccattggaatccatactaaataaatttgaaggcaaagatactaatttagaaatttactcctcagggttttacgttgatcctttttttgtattattttctgttaaagaacttccattttcttccatttgaacaatattactatataattggtacaaaaacacaatgatttgacgttttcttttgctacatttgcatcgtgtacgtaaacgaagtataccaataaccgattattatcaactttaaaacgtaatagaattatgaaaacgaactatgaaattcgctatgcagcgcatcccgaagacgcaaaaagttatgataccaagcgtatccgtcgtgattttcttatcgaaaaagtcttctctgctaacgaagtaaatatggtatattccatgtacgaccgtatggttgtaggtggtgcaatgcccgtgggcgaagtgttgaaactggaagctattgatccgttgaaggctcctttcttcctgacccgccgcgaaatgggtatctttaatgtaggcggtcccggtgtggtaaaagccggtaacgctgtattcgaattggattataaggaagctctctacctgggttcgggcgatcgtgaagtaactttcgaaagcaaggatgaaaagaatcccgccaagttctacttcaactcactgactgctcatcgtaactatcccgataagaaagtgacgaaggctgatgccgtagttgctgaaatgggtagcctggaaggttccaaccatcgtaatataaataagatgctggtgaatcaggtattgcctacctgccagttgcagatgggtatgacggagcttgctccgggcagcgtatggaatacgatgccggcacatgtgcacagccgtcgtatggaagcttacttctattttgaagtacccgaagaacatgcagtttgccacttcatgggcgaagttgacgaaacccgccacgtatggatgaagggtgaccaggctgtattgtctcccgaatggtctatccattctgctgccgctactcataactatacctttatctggggtatgggtggtgaaaacctggactatggagatcaggacttctctttgattaccgacctgaagtaataaattgagtaaaccgagactttgaatcgtaattagaaacaagttattaataaacctaagtaaataaattatggtaaacttttcattagaaggcaaagtagcacttgtaaccggtgcttcttacggaattggcttcgctctggcaactgcctatgcacaagccggtgcaaaaatcgtgttcaacgacatcaaacaagaattagtggacaaaggtctggctgcttacaaagctgaaggcatcgatgctaaaggttatgtatgcgatgtgacaaatgaagagcaggtgaacgctatggttgcccagattgagaaagaagtgggcgtgatcgatattctggtaaacaatgcaggtatcatcaagcgtattccgatgcacgaaatgtctgctgctgaattccgtcaggtgatcgacgtagacttgaacgctccgtttatcgtatccaaggctgttatcccttctatgataaagaaaggtcacggcaagattattaacatttgctctatgatgagtgaattgggtcgtgagaccgtgtctgcttatgctgctgccaagggtggattgaagatgctgactcgtaacatcgcttccgagtacggtgaatacaacatccagtgtaatggtatcggcccgggttacatcgctactccgcagactgcaccgcttcgcgaaccgcaagctgacggttcacgtcatccgttcgatgcatttatcgttgctaagactccggctgcacgttggggtactcctgaagatttgatgggtcctgccgtattcctggcttccgacgcttctgatttcgtaaacggtcacgtactctacgttgacggtggtatcctggcttacattggcaaacagcctaaataagtatatgaataaataatgggaaatggataattgatgctgtcagttatccatttttcccattttctatatcttcataatccattatccgtttttcaattatcaattgattaagcaatatgaaaaagttattccttttactggcaacagcattcgtatgttttgcctgcaccaacactaaggatgtagttaccgtaacggtaagcaatcctttggcaatggagcgttccaatgaaatggttgaggtggctatgagcgacatcgccaaccaactgaaactggctgacacagcacagattgtggttctgaatgctgacggacaacaagtcccctatcagattacttatgatgaaaaagtgattttccctgcaagcgtagctgctaacggtacggctgtttataccattcaggcaggcacgcctgaagcttttgcagtaaaggcttgcggtagatattatcctgaacgtgtggatgatgtagcctgggaaaatgacctggttgctttccgtgcgtatggtcctgctttgcaaaagactggcgaacgtgctttcggttatgatgtttggacgaagtacaataccaccgaaccggttgtagaagcccgttatgcaggtgagctgaatccggagactaaagcaaagatcgctgaattgaagaaaactgatccgaaagctgcacgggaattgtatcaatcggtatcttatcacgtagaccacggaaatggtctggactgctataaagtaggtcctacgctgggtggcggtactgctgctttgatgcccgacggtgaaatcgtttatccgtattgctacgctacacaggatatcctggacaacggtccgttgcgtttcactgtgaagctggtttacaatccgctgactatcaagggtgactcaacagtgattgaaacacgtgttatcacgctggatgcaggctctcacttgaataagactgcggtttcttttgataacctgaaagagactactcccgtggctacaggtatcgtgttgcacgaaccggatggtgctgttgtagctgatgctgctgccggctatatcacttatgtggatcctacggacaatgtgaataataataacggtaagatattcgtaggtgctgctttcccgactacagtgaaagaggcaaaatcgttgctcttccctgaaaaggaaaagaatgaactgcgtggtggtgccgatggccatgtattggctatcagcgattatgaaccgggttcagagtatgtttactactggggtgctgcctgggacaaggctgacatcaaaactccggaagcatggaatgaatacatggcaaactatgctcagaaggtacgtaatccgttgacggtgacaattaaataaatcaagtttcaccacggagtaacacagagtatcatggagttttattttataattgtagaactccgtgatactctgtgttattccgtggtgaactcattctatcagcacaaagtacgcccatttctccggttccttgtgatgccttttcatcatttccccttgtgcttttacaaaagctacccgtttagatgttttaaacttccagttttgatagaacagagtcatgaattcggctgtttccttatccgatacttctgctaaagtcataatcatatttcttgctcctgctgagcggaatgctcgttgaagtccgtagactccttctccgtcacgtatctcacccaaacctgtgttgcaggctgaaagtactaccaaatctgtgttcaacaggctcatgccgaatatttcataagcggtgagcaggccgtcattcggcagattcagtgaggcagagtctttccaggctttgcttgcgcctgagagggccagacctgtacgcagaagtggattataataaccactttttccttcctgattcaatcctttatcttttatgccggagtcgtagggcagatagaaaccatgtgtggagatgtggagtacaaatggcgattctttccggtcggataatctcctgaacgcactttccgttgcttgtctgccggagaaaacttctacaaggcatcctttctcctttaatacggtggagatggatgcaatttcctttttggaagatggcaggtagtggaagccctgtccccgtactggattctcaggtttggaaggtggtagcccgtaatctgccgcaccaaacaggacgactgatttgttttccgggtataggttgtatttctttgtcagcctgtcggtggcacagagttggaaccttaatccatattcattgcataggtataaattattgtcacttactattccggcaaaaggaatggtgctcagcaatcttgtgggaaagagagaaataacgattctgccaccgaaatgagcctgtatgggattccagatgtttttcactatgaaatcattctgccggtcatcgtcggtatcgttgagtgcagcccttaacggctcttcgtcgcagagcgggacgaagtgaggacttttatccgcattcgtaaagacgagtgcggcatattgccgggcgccgttgtcgggacgatgcagcaggatgaactcaaccatcacttcttccttgcttgtcacagtcttgagtattgactcccattcggtgatgcaacggtagggctcctgtacacttcccagtacgtatgccactgcttccctgcttagtgccatggaacgcatgctattcagtatattcggcaggtagtcccctttcaggtgtacgttcatggcgtcttctgtcagcataatctcggattgccgctgacttagttgccgtagatatttatcaccttgcatggcaaccatcttttcgttgtatatggcgggagacaccagaaagaattgtttcattagttgggcattgctgtacataaattcgggcataccttcgtgattgatataccgataggcgaaggtttgcatttcgtcgtaccaaggctggaagagactgagcaggtttgtccggtccaagtctatataataaggtatatataggcctaatgtgtgaatcaggcatgctttcattttttggtaggtctgcaaactctttccgatttcattctgtcgttcgtagcagcgggctaccagcgtgaagctgtcgaagaaattacgcagtacattgagccggtagaagttcatcgaattcatggatttccggtatcgctcatccgcttccttgcagagggattgggccgtggcataatctttcttcatgatggcgatgcaggcgcggctgcacattgcatccttaagcccggttattgtccgagtgggggtatctgtttttctgatcccatcaagtactttttccgcttctttgtatttcccttgctggatgagagccataatccaccggttctttgcttcctccaattcatattcgaggaatggcctttcacccaggctgactgctttcttgaaggatttgcttgcgtcggcataccgtttttcttcgtaataatagtcgcccagcaacgtgtgggctacagcgtacatgtagtcgttgtccgccagtcggtattgactgaaagaggacttgaatatttgctcggcatagccgcgcaggcaggcattatgtttcatgccttctgccgtcagggtgtatgcctttgccaagcggctgtatgcattttcgctgcttttcgccacatcgtcactatatttcatgtcttcttctttgaaggagaaagattgtatcagggcaggcagcagcaatttgcttatagagtcgatgtcctgcgcgttgaaggcggcggcgagtgaagcgagcaatgcggcttcatcatacatacccctgtcgaggcagtagatgcctgtattgtaaagctcccttgcgaaagtaacgttgtcgggagcctttttcaacttctctatctggcgttcacatgcttttatttccggttccttgcgttgtgcctgtgaggtggcgacgcttactaagagcagaattaatattcctgtgatgtatcgtgtcataatggatagaggttattttagaacagttttttctctttcagttctttcaggatggcggtagcctccgctgtatacgccccgtccttccggatgatagattcggctgtcaccttggctttttcccggtcgttggtatgcaaataggcgcagagtaatagccattcggcttcctcactatactccgaatcgagtatttcgggtgtcagcaaggcaatggcatcttgcgcacgtccctgtatcaggtagtccgatgctgtgcggaggatggtggcagtctcgcccccgcctcttgacggctcgattaccggtttcacatagtaagtgcggaagatatctgccggggcatagcggtaactgttgccgatcaggaacagtatgcccagcactatggccgctactgcggcagtgctccagattagcttcttgcgtttctttgcgggatgtgccgccagagcccggaatgcctgtttctccgcctcccgtatttcggcttctgccaggagcccgcgcagtttcacttgcttttgcagttcctcatccgtttccagttcccggcagaaggctttgcgttctgccggttccatttcgttgctgatgaaacggtctatctgttcatctctgtacgtgtccatcattttttctcctttctcttccagtgtatatcagcgtcttccagtcttttttgcaatgcgaatgtcaggcggcggaggcaagagctttttttgttcttggccacgtcggcgtctttgtaattcatccgttcggctatttctgccattgacaggcgttcccagtagaagaaggtgagtacccggcggcagatgtcttcggtttcctgcaccagccgcgcggctatttcctgggcttcttcccactcccgggatatctcgttggctgtaatccattcggagaagagggattgctctttttccattctgtttctacgtagccagttgcatgctttccgcttgcctatctcaaagagataagttttcagggaggtgtgcccttccgtataatttccgttctgtacattctggcatagggtagagaagctgtcttggtataagtcgagtgccgtctcttcgtctatgccgtattgcttccgcaggaaagagacgaagggcgccttataaagttcgtagaggcggtctacttctctctcccgaccggactttccgctacggaatagttgtttaatgattcccatggtcgtattattgttggtgaccgatacggaaactgtcctgtatgcttgtgtactccaggtaaggggtttgtttccttttcttcttgttcgcggtcagtatttgcatcttccgctttagcaactccgcgaagtggcggacggtgagtggcttatctttgtttcccagtgtcgttttacagaaagcgaatgtcagtagtccgtagtagcgggattggcaggcgtcgaagtattcgaagttggtttcctctgccaagcatgcgctgaaaaccgctgtcggagccaggccggattcctgtttcaggcggaggctcaactccggatgtttgccttcggtgggtacgtagtcatccggtgcaaagatgtagccggtaccgcggatgtaatcgtcggcttctggcaaccgattgccagtgccgctatggcaggcatcgagtactacggtgacgcttccccgctcgcctgccttgcgacgcaggcggcgtatccattcaccaagttcgtcgtcgcgtaggtggttctggccttcatactctccgggtgcgtaccagaactgggcatcgtaggggatgagtgcttcgtccagtccgtcttcttcgtccccgttgtcgtccatcatttgctgtccgtgacaggagaagtgtaggtatacatagtcgcccgtttgggttgcgttgcacagactttgcaaggcatgggcgatgttgcgtttcgtggctttcgcgtcggataaggtggcgatgtttgtttcttcgtatccacaggccgcgagcagggaatgtgtcaggcgggtgtcattgctggcatggatgttttcccagccgcttccttcggggtagcgggatatgccgacgattagcgcccggttggtttgggcgagggcggcacagatattcagccagaggcagagggaaaggaggctgtatcgtaatagtagtttaactcttgtcatgggcccgatgaaatgattgctctgtacaaaattagtcttttatcggatatttgcggcaggtatgagtgaatatttgcacagtgaaagaaattttttcccatcgctgtatattttcttctttcccatcctctcctgtcttctttttcctgtttgcaggtgcggcgggccttcatttcatatctgccatggaactcctcactgcggcagatggcgctggaatgggtgtaagttgttgatatgtagtggtgtaagcttcgttttgcaagccggaacgaggtgttttgcccattgaaacggagtgtttcgcctgttgaaacaaggtgtttcacctattgaaacgaagtgtttcattgcttgaaacaaagtgtttcatctgttgaaacagtcagtttcacctgctgaaacgggagacggaatagggcgtcggggagtatatgattaaagagaaatgatggaattggccgatcaaaaggaactgaaatatacctaatcgggtataatgcagttctgaaaaagaggggcttttcgggataaaaaggggtgaaccctatcgaaaaagtagttttatccgctattttccatctcttcttgtttgcttgaattccgtctgtttgattctattttgtcttaatggaatgcatttgaatagtggaaatggaatagtgtattcgaagtgaacgctatttttactgtttgctttctatttgaaaagtgctgaaagtatttccttgcatttctttttatcaccggacttgatgtattatgaactactggtttcccgctgagttctttctgtttcctattcaacagagtatgacaggaaaatttgtgagatgcagataaaaatttccgactgaagccggaaattatttatttcccctgttaccttttccctgtttcgggtatagaagataagaaatgctcttttaccttgtttttattccctttccgggaaagcgctttttattagtgtccaagctgcattgtccgttgataggggaaaacaagataatgttttttggggcaaacaaccttgttgcagatgaagctgtaaaggtaattaacttaattttggaactgcaataatagatgtaaaatgatggatgataaagcacatataccctaccgcacggcaaagcgtttcttgatagaacttatcaagaataatgatttttcgggtgatgaggaaatcataagattattgcattctattttgcaggataagtcctgccttagttatttcactgccggaaccatgagttgtattcgcattgacaaagaggctcgcatctttcttcccgattattcggatcaggaagtgaaaatgccctgtctgcccaagacggtgtttctgttcttcctgattcatcctgaaggagtgagttttaaaggcatgcgcatccacttgcaggaattgtataatatctatcagatggtgatgaagaagaatattgaggcggataaaataaagcggatactcagtaatctggtcgatccgatgagtaactccatttatgaggtttgctccataatccgcaacagactactaagggtggtggggccttcgcgaatggaattttatgacattacggggaagcggagcggataccatcacattctgctggaccgcaaactgcttgtcgtggaacatgagaagttgagacagatgatggaaagatgaacaagtgaatagttattaatataaagacaatattatgagaatcatgaaagcaatcctgattggaatcctcctctgcgcaggagtggggataaaagcgcaggataaaattcaagtgacttcgttcaaccgaatggagacggatattacggcacgtgtcactactccccgtaaagatcagaacggagaagtatgcgcgcttatccgcatagtcaccacaattaaggatcttatgttcgagccggatgcactcggcattgcggcacgcgaaaacaagaccggggaaatctggctctatgtccctcgtggggcaaggcgaatctccattatgcacgataagttcggggtgttgcgtaactatttctatccggatatcatcgataagggaacggtttatgagatggaaatccgggtcaacgatgggtccgggcaagttgcggtggacaccagtacgcagctgctcgtcatgcgccccgaaccagccacggcggatatctacattgacgatgaaaaggtaccgacagagaacggactgtttacggctaccatgaagaagggaactcatacctaccgggtggaggctcccatgtatgccttcgatgcgggcataatcgacttgggaagcgagcagaagataatgagtgtgactttgaagccccgtttcggttatttggaagttttcacccttcccgaacaggatgccaaagtatatatcgacagcgtgctcgtggggcaaagtccttataagagtgatcgtatgccgttacgatcttaccacgtcaaggtagagaaagaatttttctttccgctggatactttgctcagtgtttcggcaggtgaaaccactacccacactttccggatgatctctaccattaaacctaaagaacctcgacgcacgcttgtgatgctggaagcaggctaccatccttcgcaaacctctttcggaggtatggtaggatttgtaggagccaacggtgcttacatccgcttccgtagtgatttcggctcggcctctaccgaactggaatgcgatgataccggtgagctgaccgccggcggaacaggtatgccttattataaagaaggtgttacgcagaaagcccgcatgtccattacggcaggatatatgcgtcgccttgccaagccgctctatgcctatgtcggtgcgggatacggtaatcgtacactggcctgggaaacggtggaagacgaactggtgaagaacaccgatcattcggcaacgggtattgccgccgaggtgggagccattggcaggctgggtaagttcgcggtctccgtaggttttcagacggttggtttcaagtatcatgaacttagtgccggcctcggatttttcttctaattcataattgctaattcaaaacgttcagaaatgaatagattaaaacaaatcatagggtgtattctgctgttattgctggcaggttgtgagaaagacaccgaaccgacaaattttgccccgaagttgagtacgggggaggcgtcggaaatttatcgcatcggagctacgttatctggaagtgtacagaagtcagaaggtattcttattaaagagtgcggtgtcctctattctactatacagagcatggctgagtatgagggggcgaaaatatctgtagaagaagcggcatcctttacggtctctttgcagaatctggttccgggtaccacctattattattgtacctatgccagtagcggccgtagtattgccaaaggcgaggtcaagactttcactacgatagcaaatagtgctcctttattcaacaatctggttcttgaggcagtagatgaacagagtatcacactctctaccaccataaaggatgatggcggcagtgagatgactttgcggggtttttgctggaagctttctgaaaacgatgatgaaaaggagcctacgatagccgataatatgaccaatgtacctttggaagagcttgttttcacttctaagataaaggggctggagccgttgaaaacttatttggtgcgggcttatgcagtcaatagtataggtgtgggatatggagaaactatgactgtacagacaaaggccgcaaccattccggtagttgccgccataaccgaggccggttccactcctcttagcgttacggtagagtcgtcagttatcagtaacggggagatgcctattcaggagaaaggcttctgctggagcaccgaaaataaggagcctaccacagcgcacatcaagaaagtggtggagggagacgatgaaactttctctcttctgattgatgagttaaagccggtgaccacttactacattcgtgcctatgcgaccaatgcattgggaacaggatacagcgagacttttacttatgaaactcctcttaatgttccggatttggatgcgactactatgacggaagtgaaacctactacagcaaaagccgcttcagtggtaatttctgaaaatggtagcgaaatcacagagaaaggcttctgcctgagtaaaacagagaaggaacccacgatagaaaatacgaaggtcgtagtgaacggaagtacggctacatacagtgttgtattgtctaatttggaatctgctactacttattatatccgttcgtatgcaacgaacagtaaaggaaccggttatggggaggtggcggaatttactactgccgttgaaataggcgaaactaccgttaatggcataacggataccgatgcatcagtctctgctgaaatactgacaccggccgagcaccttgccattacagagaaaggtttttgttatagctctgtcaatgcggttcccactgtagccgatacgaagaaggtttcttccacacaaggaaatagcattactgcaagcctgacgggattggcggatcatacgaaatactacatctgtgcgtacgtggtgaatgacaaaggtacatattatggggcagtgcatgagtttactacgaaggaaggagttactgtcggcgctactttcatctcagatattacccaaacatctgctgtggcttcttccgaaatactctctgatgcgggaagggaggtgcaggaaaaaggtttctgctatagcataacgaccccggaacctacatccgccgatcagaaagttacttcggatgcggaaagtagtctgattactgccgctatcaccggattatcctcaaatatgaaatgctacattcgtgcctatgtgaagaatgcccgtgcctaccactatggcaaggtgacgagctttaccactccttcggagaaggctggcgaaccggttgatctcggcttgagtgtgaagtggtccaattggaatgtcggtgcttcttctgttgaagaatatggagggctatatacttggggagacccgacgggaacactcgtcaacagcgccggtccgggtgttaacgcgggaggtgaaatcagtggtacggaatacgatattgcccgtgtcaaatggggagatagttggcgaatgcctacgaaagctgagatggaggaattggtaaataagtgtacccggactactgtcacgcgcaatggcatctccggcgtggagtttacaggacctagcggaaattctatttttctgcctaatggcgggttgcgtaaggaaacgacaatagaaagtcaaggaataagttccttttattggaccgggacaggctcttcgttttcctatggctttactagtcaagcttattatatggtaaatggtggtatgagagatcactattgcactaacggattttcggtgcgtccggtttctgattttgtaactgttggggaaaccgctataagtggtatttccggtacgggggcatcagcctcttccggcatcgcatcgaatgaaggacttacgattgtagaaaaaggcttctgctatagttacctgaaaactcccactacggatgatgacaaggtagtatgccagacgggagggaatgggattgaggccattctcagcggcttggttccaaactctaaatactatgttcgtgcgtatgtggtaaatagcaagggggggacagtatatggttccaaacttgaatttactacgaaagatgaatttccggtaggtgaagcggttgatttgggtttaagcgtgaaatgggcgaatatgaatatgggtgcaagcaagcccgaagattatggagggtactattactggggagagacaggtatgtggaatgattattatgatagagaagatacccctgaggatatcagtggtaccaagtatgacatagcccatgtgaaatggggaggagactggcatctgcctacctctgaacaagttaatgaactattatcgaaatgtacgttgttctggacgagccagaatggggtgaacgggcttttggttacaggacctaatggaagtacgatattccttcccgctgccgggagtcgaagttataatattgtatctcagaggactgagggaaagtattggtcaagtaagctttggaagcagtttgatggcaatgcttattgcttaagttttagtgaaaccggtgaagagactaaagttcaggctcgtgcgataggattctctgtacgtcccgtgacaaattgattattctcttgtgacaggacactcgtttataaataacggaagtaaagcattttatgctcaatatatatgtaaatacaattagaaactattatgagaaacttgatttatggattattgtctgttggagctttgatatgctcggaagcgcatacgcaagcccagaacatgaatttagccggtgtgtatgaggctaatgagaaggctaatggtggagtcagacagctttatgccgtacttgatttcaatacgagtcaggcgaaggattttacccaactttttaccggaaagacagcgcaattccagttgctgccggaagactttatgaatgtaaagaaactgaagaaaagatttgcaggaaacacttcggcaggttttgttaggtatcgggagaaattcttattagccattacggaagaattgaaactgactaacccgcgactggaagcaggcatgattgtggctgactgggaaaatcattctggtgtgaaaggtacatgtggcatcattgtaaaggaagataaatccattgaatttgtagggctgactaatctgaatcgcgatttgaatccggacgggctgaccgttgcttgtgtagaagaccgttgtttggctgatgtgcctcgggcaaaaggtacgccggaaggcgttgaacattttgtgcgggagtatgaaaaacgttttatcaagaccactgttacctcatgcgatccggaaattaaagtagagtttaaaggctgtgaacaagtaggacagctggtacagattcatctgcttattaccaatcaaagccaaatggaatttaagatggcagtggatggaacggagtctatggctacggataaagagggaaatacttacaaagatataacctttaactttggagagcagagcggtaacggtaaagcgaattgttttatggcaaaagcaacaccggttaagtgtacggtcattattccggtgaagaacggtcgggtgcacctttttaataaagtaaccatccgttcttatggtatggggtcagctatattcaccggtaaccatttgcagttggataatgtgccggtaatgcaatcggtttctgtagaagaagaggaggaatttgtacccaatgccagtcagccgcaatctccccaggaacttgtcggacaactgcctgagaagttgccgaaccagttgatagctgtggtaaagggaggcgtcaatctgcgtaaaggagcttctacaacagctgctttagccggtaaagcagctttaggcgaagtatttgcctttgttgggactgaaggttcctggaatgtgggaatcagttctcaaactggtgagaaagtatatatagctaaaagtatgagcaaagtagttgatacaggcgtgggaatcttgaatacagtattctacacctccacttatgctaatcattatctgaattccaatccgactactggatttgaacgaaactcggactatactttctggacgcggcagggtgataaaatctctaccgtgtatgcaacatttaatgttaacaccactaccatgacaggacgcatgagcagtacatctgtcaactacaaaggacaactgaaaggttggtacattgtactggacgagaaggtggatgtaggcggtaatctgatagagaaagtgactcccatttatgtttatcctgacagtaatgaagatgctgtttatgtgaatggagtgaagtttgttgccgagggtatataagcggaataagattttatgaatttattaacggacctttgggaacttggaggtcaaaatactaaatattatggtatataaaaattctatgttggctctgttggggcttctcatgatgggttgctgtctgctttcagcttgttcggcttcggtagaaaatactccggaaggtgtggcaacatttgtagtgaatagttatatgaagggcaaatatcccgatacgagggaatatgccactcaggatgtaatgaaagatctggataagtggacgcaagagtcaacggagaaggtgttgaaaatctatggaggtgctgaagtagagtttgataaagtgtcggattttgcagcggatggttccatgaaagatgtgttttttaatatccggattggtgagaagaaaagacggatgagcgttagaatggtcaatgagaatggcaaatggctatttgatggattgcaattatgctaagcaattaagatagtaatgaagattttagataaaataggttcttggattgataagcttgatgccaagatctttgggaaagaaaactatcagccgttggctggtcagggatttgtggcagcgttgaagacggctgtgggggtaggtatcgtactgtttctggtgcagatgttcaccacaggcagaacgctggaaaactggacggcgggtattggcgctgcttgtattctgattgctatggtgatgaagaccttgcctaatttcctggggcaaacgttgagtattggggcgaagatcggttatggcttcttttgctttttcctggcttcttttgccttgcaacttgccatgtatattgtgatgctgctgttgattattcttgtgctgtacatagcgtttttctttatgggcggaagtactggtaaaagtggaaaagcggctcgtgacgactgctactattgtgagattagaggagcaggcagacgtgtgtgcctaaaggagagtggatatgagggaagagaggttgaatgtaatagttctaatccggttaactgtccgcactatattaagcgttgaagctgtattagaaagaaatataagtaaaagcaagaggtttatgtgatatatgaaaatcacataaacttcttgttttttcgttacttgtaaaggttgtcacagcaatttaaactcgtatccttcctcttccagaaaatccaatgcccgcggcagtgcatattgcaggttgccgttattccaggacttcagcgagtcgtggaaagtgataatagacccgttccgtgcatatctcatcacattggcaagtacttgcggaccgcgcaatttcttactgtagtcacgcgtaaccaaatcccacatcactatcttataatgccgtttcaaggtgaaatattgtccccagcgcatgtgaccgtgcggtggacggaagagatctgttttcatcagttcattcgccttgtccgtattggcaagataattgtcggacagatattcgaatccgcggatatgattgaatgtatggtttccgatgcggtggccgccatctactaccatttggaatacatcgggatgcttgcgtatattgtctcccaccatgaagaaggtggctttgatgtcatgtttatccaatagttcaagtacccatggggttacttcggggatgggaccatcatcaaaagtcaggtagacggatttctcgttcggatccattcgccaaatggcaccgggatatagctttcggacaaactcgggaggctgttctataaacacggttattagtgattaacgattattgataagtgattagtagttagcggttagtgataagtgattagcggttagtgtgcgatgttacggcatagccgttaatcacttatcactaaccgctaatcactatttcttatttcatacggtcaacgcacatctgatacaattcgttcagcttgctgtcatatatcggagccagttcggaattatacttctgcataagcttcacttctgaactgaggataggcagctgatagtcgatgatttcacggctggacatagcaaaacgttgttcatccaggctcagataccaagtgaggtattccacagccttgtcggcaagtgccttcataatgctgtcggctttctctgtttcgcccagttgatagtatgcttctgccatttgtacggcaccgttctgccagtcatacggcacattgtaggcaggaatcatcttctctgcgtagtccaatgctttcttggccttgtcattcttgccttcacgtatcaactgacctacgagttgtgagaagatacgtcggtgagaatagcacatacgcatggcgttttcatcaatatagataccttccttgtcgatgccaccgaatttgaacttgttcatcaggttgtcatacatcttttcgctatccagtttgacacctgtcttgtcggtatcgaacggagtgaagcgataggttagaccttcctgtatgaagtgattacccatgccgaggtggttctccgtacctacgctgactgccatgtagataggacgttcccaattggcttctgccagcatttcaagcatcatcagttcgctcttataaagggcgcgtttgcctttcagtgagatgtgcatgtaatcggggatactgtcgcccggtatcatcatgccgctacggcgtacagcttccttatccaccttcagtacaatgctgtccgtaggaattactttgagatcttcatttttgcttcgtacccaatatttcaggatgttctgtaattcgtacgggttttcaccgaactctttcttcacatttaccagagcttccgggttgccgttcagtgcctgcttttcagcttcggcatagagggcgtcgatgctcttcttgtaatcggcctgtacaggaatgtattcattggttccttccacgtaatccatacggtcccaagtgatgggcaatgacggagaatcgtaagcaggacgcttcatctggtcgatataccaatctgtctgtaagtaactgaggttacaagtacgtgcatccgtgcggaatccttctgtttcctgattgtaccacaaggggaatgtatcattatcaccgttggtgaagataatcggattgccggtttcttgcagagacatcagatagttctggccgaagtcacgtgccaggtagcggtcgctgcggtcatggtcgtcccacgtctggcttgccatctgtatgggcacgaacaggcagacaacggatgccagtgttgcggccggaagttccttcatcttggcgtagtgttgcaacaggcggataatacctgccacacccatacctatccaaatggcaaaggcgtagaatgatccggcgtatgcatagtcgcgttcacgcggctggctcggtgtctgattcaggtagagcacaatggcgatacccgtcatgaagaacaggaagaacactacccagaactgttgaatacctttctgtccgcggtatgcctgccataaaaggccgatgataccgagcaataaaggcagacagtagaagacgttgtgtcccttattgttttgcagttcctgcggcaacagactctggtcgcccaccaggaagttgtcaatgaacgggatgcctgtgatccagttaccatgttctatttctccgctgccttgcaggtcgttctggcgtccggcgaagttccacatgaagtagcgccagtacatccagttgagctggtaggtgaagaagaacttgatgttttcccattgtgtgggcatgttcaccatcaccatttgtccgcactggtcatagggaacgtcttcgcccttaatgtctacccaggcttgatattccctggcatgctgactgctgtacatacgcgggaaaagcatattctgcgcgtattcgtattcgatacgtccggggatttcgatatagctgtccttttcatcgggagtggctttttccttgcggataaatttggttccgttgtacgagatacgcggttcgcaatagccatcttttacatcgagggctactttggaagagaatgcctgtccgtagaataacgggcgggttccgtattgttcacgacccagatattcacccagcgtgaagatgtcttcgggtgagttctgatccatgggggtgttggctgtagagcggatcacgataatggcgtaggaagaatatccgatgacaatcatcatggtacacaacagcgaggtgttgagcgtacgcgcagaaacacggtatttctctttcatacttgcctgcatcttcgggctgaggtagaagaacaggaaggcgataacaataatacctataataacagcgctcgttccgtgtccgtagaagggaatacccaacaaggcaattgtcagtacgaaggagacggacatgcgcatcttgttcttttccgtgtagctttcgtatactccccagatgatggaagctgccaatacaatgatgtaaaccattacaccgctgttgaaggacattcccagtgtatttacgaagaacagttcgaaccagcctcctacttttacaatacccggtaccatgccataaagtacggcggcaaccagaatgcccgaagcgagcaatgccagtaatgaacctttggcatttgcgttgggcactttcttgtaatagtaaaccagtacgatggcaggcaagcagagtaagttcagcaagtgtacgccgatgctaagtcccgtcaggtaagcgatgaggataagccagcggtcgctgtgaggttcgttcgctacatcctcccatttcagtatcagccagaatacaacggctgtgaaaagagaagagaatgcgtaaacttcaccttcgacggcactgaaccagaaggtgtcactgaatgtatatgccagtgcgcctaccagaccgctacccatgatggtaatcagttgtccgcaggtaatattattctcatctgtaacaacaagtttgcgcaccaggtgcgtgatgctccagaacaggaacaggatacaagcgccactcatcagtgcactcatatagtttaccattttggcaacggtgctcgggtcggaggcaaattgtgagaacaggttggctaccagcatgaagaaaggtgctccgggcgggtgtcctacttccagtttgtagccggtagtgatgaactccgggcagtcccaaaaacttgcagtcggttcaatagtcatgcaatagaccgtagctgcaatgaggaaagtaatccaacccacaaggttgtttacggttctgtactgtttcattcggaaagaattcgttatgtttttaagttatagctctgtatttttgtatatacggccgcaaatatagtgatttaactgctaaatgcgtggaggtaaggcatatttattaggataggttaaaagatatacattgattttttgtagagaaaagtttcaaatattatagctttgatgtttaatgttcgcaattacagcatccacattcgtcgccatgtttatgctctgccaatatacgatggggcagtgctccgtgccctaataactctatcggacaattgaagttccgttccaaccattcctcacttatccccgtgtcgggatgataatccagtgtttcattcacacaggcgatggacttcacttgttgcagtactgtgccgatatcatggctgacaagaatgatggcgcagtcgtggttaatctctgccaatagttcgtaaaggcgggcttcgaaacgcttgtcgatataggtactgggttcgtctaggacaacgagttgaggatcggagatgatggcacgccccagcaaagcacgttgcaattgtccgccgcttagtgcaccgatggcacgttcttccaatccttccaatcccatgcgggcaatcacttggcgggctttctcccgatgtgctgcggtgaagcgtgaaataagtgacttttgcgagctgagtccggaaaggattacttcttccactgtaatgggaaacttacgatctatactgttgtattgtggcagatatcccattttgagtgctcgtccacctctataaagaatttcccctccagtaggtttcaacagaccgagtatacatttgatgagagttgtttttccgccgccattagggccgatgatgcccagaaagtcccggtcgtaaacggtgaggtttatgttgcgtaataccgtgcggctgtcatagccggcactgagattctttatttcaataagaggcgtacccatttgtttactgcttgacgatgtctttagttcttaacgaccaattccttggcaatgttcaacatttcttcttcccaatcgtaagaaagcggattgatagggattaccttcgttcccgtctgtttggcaatgatctccgcattgcgacggtcaaattcaggttgtacgaagataacacggactttctcctttttacaagtgtctatcagattcttgaggtgggagggagaaggttctttaccattttcttcgatggaaatctgatgcagaccgtagtcgcgggcaaagtaagataatgccggatgataaatcatgaaagcacggtccgcattgggagccgacagcatgtgacaaataaggctatcggtatgttcaatctggttgcagagacttttgtaacgctccatatagacttcttcattgcctttgtcgatggcgcacagtgcatttacgatatttccggcaataatctgtgcattataggcagaactccaaacgtgcggttccacacccaaaagatgctgatgctcatcgtcttggatggaatcgtgggcgtgaggttcatcggcatcgtgatgatggtgggcgtgtgaggaatcataaatcaggtcgatgccgcgggaagtatcgaagaattgcaggtgcggagcgttatccgtcagcttgtccatccaggtttgttcaaaaccgatgtagccgatccggaagtaggctttgctcttggcaagatctacgagttgctggggggtagggtcgtaggtttccgggctacttcctttggggaccatgctgataacgttgaagttatcgcctgcaatggcttcggtgaaatagcgtaatggctcaatagtgacagtgatgacaggcttatcgccttcactcttattattttggacgctgctgttcttgcaggatgcggcgagcaaggcagcgaggatgtacaggaatgttcgtttcattattatatttatggtttttataattgattactctttatggtttctctttcgttgccctcagtatctcccgttttccccccggaggtcccggaagacgctccacacggaagcccacagcttgcaacatacggcggatgacacctttggcgcaatacgtcgtcaatattccccctgtattcatataaacgtaaagagagcgaaataattgctcgttccacatttctggttgcttttcaggggcgaaagcatcgaagtaaacgagatcaggatttagtgataaccacttatcactaatcgcatccatctttatcttccgcagggtgaagtgcggggatatttttacgtcttcttcccacggggcggtgtgcagctgcttgaacagcgggttattgctatatcctagtgcatcgacttcttcccaggcaaggggatagagctcgataccggtataatgtacgggacgcgcatcctgttcggcggcttccagtgtgagcaaggcattcagtccggtgccgaagcctatctcaagaacgtgcggttgcggtgcggcagaggctttcagccccatgttgataaagatatgctgcgactctgtacgcgcccctttcaccgaatgataatgttcatccagttcgggcacaaagagcgttgcgcttccatcttccgtacgttctataattcgtttcataatttaaaacatagatattactccctgcaatgccagcagcatcacggcataccgtatcagctttccggcaaacatggacgaagtagtcagccatacattgctacgcatgaaacccagcgcaatggcaattacttcgcccacgaagggcaggaatgcgaaaaagcccatcaatgctcctttaccttgaaggaatgtctgcatcttgtctactttttctttttttactttgaaatatttctctatccagactacgttacccagacgccccatgtagtagcacgtcataccgccaatcgtattacccaacgtggcgaagagtacacacatcaccggactgagccctacctttaccagtgctatcatcaccagttccgaactgaacggaacgatgcttcctgccagtaaggcggagataaataaaccgagatagccccagtctatcaggagttgaaccaatgagtctacaaaagcatccatacgttaaatccgaataagagtataagcccggtaagggcacaaatgaaaaacacattagaagcccgactgttcgtcagtaccacgaaatgtcctgtcaggatgctgacgcctatcaacagcaagggcaggaggtgaaacgtttgtgccggttgcaacaggatatagacgaagatgcagaacgtcaggaaaataaggaaatgcagatagctgcgggtacgtatcttatcttcgtaacctgccaccaggcagtgaacggagcttactatgaacaacaggaacaaatagcccaatgtagcgatttcccataatgggaagttccataaagtaatgggatggaacgtcaccagttcgatgaatggctgatagaataattctatttcaccatagaagtaggcatgtccaaacaggaaccaataggggagcgtccagccgatcagacctccgaaaaagctcttaggagtgagtgcctggaaactgtatgcaccgatccagaaaatgggaatgaacaatgtcagttgtgggaagaacagactgcccgccccgataaacaggaacgagtagaataggatgcccgccggacgtggatgttgatagcccttgaacaagaagaacaaggatatcagaaacgctgtcgaggcaatgtctccggcatataactggtgcatgacaggacagacagatatcagcaggaagtaaatggctgtctgcacggatgcccgcatacggataatggcgaaggtgttgttcagttctatcaggaagtagccgattataccgtaaagtagaaagcttaggggcgcacttgcccatgtcggaatccaatcgctgtagatggtttcccacaatggataattgcttttcatcactggaatctcgggtaataagatggaagtcagtacccagcagaacagtgatagaaagatagcagcggggagggtgaagcgccccgctgtaatccggttctgtaatcgtttacttcgtatcattataataaaggtgatggggtgattagagatcgaacccgatgtcgcggcggaaatacttcttgtcgaagtggatcatatccgctactttataacttttggcaagggcttcctccttggtttcaccatacgaacatacggcaatcacgcgtccgccgttcgtcaccacttgtccgtctttcattgcggttccggcatggaagaggatgctgtccgtggctaccgctgcttcaaacccggtcatcactttgcctttttcgtaagcttcggggtatccaccgctgacaagcatgacacaggcggctgtacgtggatccattaccaatgtcttggtgtcgaggttgacatcgcgtacaccttccagaagttctacaaagtcactttgtacacgcaacatgacgctttccgtttccggatcgcccatacggacgttgtattctatcaccattggttcacctttcacacggatcaagccgaggaagatgaagcctttgtaaaggatgttttcttcctgtaatccgcggatggtaggttcgatgatgcgggtacgtaccttttccatgaatacctcgtcggcaaaggggacaggagttacacttcccatgccaccggtattcaggcctttatcgccttcaccgatgcgtttgtaatctttggcaacaggcaaaaccttatagttcttactgtctgtcagcacaaatacggagcattctataccgctgaggaattcttcgataacaactgtggcgctggcctggccaaacataccgccgagcatttctttcagttcccgcttggcttcttccagtgtggggagaatgagcacaccttttccggcgcatagaccgtcggctttcagcacgtagggagcttcgagagtttcgaggaaagcaaggccttcgtccagattagcagcagtgatgcttttgtaacgggcggtgggaataccgtgacgttccatgaagcctttggcgaactctttgctgccttccagttgcgcacctttagctgtagggccgatgatggcaatatgttgagtggaggcatctccggtaaagctgtcgtagataccttctaccaacggatcttcgggacctaccacgatcatgtctattttttgttctaaagcgaaggctttcaaggcagggaaatcggttgccttgatggatacgttctcgcctaccgtactggtgccggcattaccgggggcgataaaaagtttctctactttcgggctttgggctattttccatgccagggcatgctcgcggccaccacttcctaataataatactttcatctttatatttcttttaattgtaatcacttatttcctaaatactcttcaaaataacgggttatcttttcatgtagatgtacccggtcacgtcccttgacattgtgcttatgtgtgggatagataaacaggtccggatatgtgcgtgcatccacacaagcctttatgaacgaaagtgtatgttgaggtacacaagtatcgtcatgatcatcatggatcaatagcagatgtcctttcagattgccggcaaggtttttcaggttgcactctttgtacccttccggattactctgtggggtatccatatagcgttctccgtacatgatttcataatatccccagtcgatgaccggaccacctgcaacgcctaccttgaatatctcgggatagcggagcagcaatgccgtagtcatgtgaccaccgaaactccagccgtgcacaccgatgcggttgccatctacataaggcagacttttcaggaattccacacctttcacctggtcttttccttcttcaatgccaagatgtcggaaagtagcattttcaaattccagtccgcggttgtcacttccacggttgtcgaggctgaacatgatataacctttgttggccatgtagatatcccagccacgtgcaccgttctgccaaccgccggtgaccatttgggcgtgcggtccaccgtatacatagacaatggtggggtattttttgttcggatcaaagtccgcaggttttatgagacgatagtaaagatcagtcacaccgtcggcagctttgatggtgcctacttcgatgctcggcatggtgaagtccttgaatggatcttctgctgtcagcagattgatgcttttcccgttttgtgtggcgatgaggttgatgctgcgtggcgcttcagggctggaataggtatctatgaggtaactgccgtttgcactcagtgtgccgtggtgtataccttccggtgtgcctagcgggctacgtttgcctgttgctatgcttactttgaagaggttgctttgcaacggggaatattccgtggaagctatgatgatttctttctttccactgttgaagccaagcacatcttgcacaagccagttgccggaagtcagttgcttgaccagcttaccgtctgtgccatagaggtacaggtggttgaagccgtcgcgttggctttggtagataaacttgctgttgtcccacggcaggaatacgatggggtgctggggttctacgtatttgggatgtgtctcttcaaaaagagttcctatcagttcgcctgtttctacgctgtactggcatagcttggcatggttctgatcacggttcagctctatgagataaaggcttttggcatccggtgcccaacttatattggtgaagtaacggtcggtaggatcacctgcattcagataaattgtcttctgcgtttcgggattgtagatgcctacagttactttgtggctcgtcatacctgccatcgggtaacgtacattgttcaattcgcccacccgtgcggtgatgtccactaacggatattgtgttaccatgctttcatccatgcggtagaaggcgagcaagtcacctttcggactccagtaagttcctttgctgatgccgaactcgttacggtgtacgctttgtccgcatacgatcccttccggttcgttggttacggcgcgatcgttgacataaagattattattcagagtgtaagcaatatggccgcttacggtattataatcctcattggctgccttttctggcaaggcttgtttgctgatgattttatccgctttccagtcgtaaacgatataattaccgggcagggtgataagcaactgagtcttttcagcccaaggcaggctcacctgatataaatgactcagtttacccagtttttcctgttccagtgcttggttgattctctcacgcgtcaggagtagggtttcctttcctgttttagggttcactgcaaacaaagagtctatttcgggcttgatgcacgtgtctccccaccattgcagtccgtacaggctttttgcaaagcgataggtctctccgccggggatcaggtcttccagcgtcggtttctttaaatcttgtgccataacgttcgttgtgaagagagcggatgatgccaataataccactcccatccatttactgattatcttcatgttcatagtcttttgttagtcattctcttttctaaaacctttcacttctattctgcccattggtgtacttttcacttgtacggcggcactcagcttggcaaaggcagagtatctaacacctcctttgtttgaggtgacaatttggcacctcaaactgtctttcagcaacttactctccctcttcccgctttctcggtttaaactcccttttcggcttgaactccccgtttcctcccggacgacgttctctgtcaaacggttttctttccctgtctccatccttgcggaattcccttggcttgaattcccctctgggcctgtcttctctcgaaccaaactcccggggtttactgtctcttggtctgaattcccttggcttgtcatctctggatttgaattctcctggtttgcggggctctctcggtctgaattcacgtgattctcttggtctgaactcccgtccttctttcggtttgaagcctgattctttagagtcttctccctcttcactttcaccttcctgtttcttgaattccttgtatttaccgtcgaaaatctcgtatttacggaattcacattccagtgcaccgttgaacagaggtattttggcagtcggtttcagtcctatctggtcgaagcactcttcacgataagagagcacccatgccgtgtttccggtgaaagcgtgtttcagacgctcgcctatcatctggtacagtcccagcagattattggtagaaatacgttccccataaggcggattggtgataatcatggacttttccgccggctgttcaaactgctggaagggctgcaacttcaagacaatgtctttcgatacacctgctgccttgatgttgtgcgttgctatttcgttagcctgcggattattgtcgtatccgtatatcttatgtgtaaactcacattcctgactgtcgtcgttgtaaatcgtatcgaataaatcctggtcgaaatcattccacttctcaaaagcaaattccttacggaatactcccggagcaatgttacgtgcaatcagtgccgcctcaatggggatggtacccgaaccacacatcggatcaatcaaatcacattctcctttccagcccgtcatgaggatcattccggcagccagaacttcgttcaacggagcctctaccgcttcctgacgataaccgcggcggtgtagtgactcacctgatgagtcgagcgaaagcgtacacgtggtttgtgcaatgtgtatattcagcagtacatccgggcggttgattcgtacggacggacgtttgttgaatttctcgcggaaataatctacaatggcatcttttactttataagatacaaacttagagtgacggaattcttcgctgaacacaacggcatctacagcaaatgttttctccacatccaggatgttttcccagctgatagctttgatttgttcatagacttcatcagcatttttggcagtgaagttcttgatcggtttcaggatacggattgctgtgcgcaagcagaagtttgccttgtacatcatttccttgtctccactgaaagacaccatgcgtcggcctatttctatgtcgtttgcccctaatgcagtcagttcttgtgctaatacttcttccagaccttgaaaggtcttggcaatcatttgaaaggattccatctgtttattattgattttacgatttacaattttacggttgaagctgctgtaacttcttctgtatctattgtttctattgatgattactattctcttaatatcccttttacggaacacttgtacttctcggatgtaacgcttgtgtctctcttccgaaacacttgtgttgctcagccggaacgcttgtgtccctcaaccggggcacttgcttgctgactgccggttactttttggctttagtctgtacaattcttgctccggccggaacgtcttccgtcacccagatattaccacctaccgtggccccctgtccgatagtgatacgtcctaaaatggtggcattggaatagacgattacattgtcttccagtatcgggtggcgtgggatacccttgatcggtttaccgtccgcatccaatggaaagctcttggcacccagagttacgccttgatacaacttcacgttatttccgatgacgcacgtctccccaattaccacacccgttccgtggtctatggtgaagtggctgccgatggcggcacccgggtgaatatcgattcctgtttcgctgtgggccatttcagtgatgatacgcggaataaggggcacaccgagtttcagtaactcatgcgcaatgcggtaattgctgatggcacgtatggcgggataacaactgattacttctccgaaactgtgtgctgccggatctccattgtaggcggctgccacatcagtggccagcacacggcgcattcccggcaaattgctgatgaatttagcggcaatcagtgccgcttcttcacgctgaagttcagtgcagcaggtacattctccgtttccggtgaagcaaagccctgcaagtacctgaccggtcagcaagtcgaacaagcgttcgatgtttacgccgatgtgatatttgatggtgcggctgttgactgtggaattaccaaaataaccggggaagaggatggcacgtgatagctctacaatatcttgcagtgccctagccgaaggcaatggagtgccgtccgtgtgctgatgaaacagtcctttgtaagatgagctttccgatagttcatcgactgcctgtgtcaaaatgtgagtaaagttcaatggactcattgggatatcctttttataataaggtgggtacaaaggtaactattctcagcgaaaatccctcatttatagtatgaaaatcccacaaatatggtatttcctatgaaccgttaaccctctatctttgtcatttagaaagaagagtataaattaaaacccaatatgttatgaaaaagatagcaaaacagctcacggatctggtgggcaacactcccctgatggagctgagtaattacaataaatcaaaggggctgaaagcccgtctgattgtgaaactggagtcatttaatcctgccggaagtgtgaaagatcgcgtggcactggcaatgattgaagatgccgagacttctggtttgctgaaacccggagcgacaatcatagaacctaccagtggaaacaccggaataggacttgcatttgtggccgcttcaaaaggttataagttgattctcaccatgcccgataccatgagcgttgagcgtcgcaacttactgaaagccttgggtgccgaattggtgcttacgcccggtgccaatggtatgaaaggggctattgcccgtgctgaagaactgaaagcggctacacccggtgcggtgattcttcagcagtttgacaaccccgcaaatcctgccatgcacgaacgtactacaggacaggagatctggcgggatacggaaggtcatgttgatatttttgttgctggtgtagggactggcggaacggtaagtggagtaggcgccgccttgaaaaaacataatccggctgtaaaagtggtagcggtagagccgaccgactctcctgtactttcaggaggtgctccgggagcacataagatacaaggtatcggtgccggttttgttcccaagaactacaatccggcagtagtggatgaaatattgcaggtaacaaatgacgatgctatccgtacaggacgcgagttggcgcagaaagaaggcctgctggtaggtatatcttccggggcggcagtcagtgcagccactcgtctggcacttcttccggagaatgaggggaaaactattgttgcattattgccggatacaggcgaacggtatctctcaacgttgctatatgcatttgatgaatacccgctgtagaatataacttaatttagggttcgcaggcggaaatatgttcattccggtacagtagtgaatcaaatgctgagcaatactatctcaattctcctcctcctgggaggaggagtacccgaagggggaggtggtaggtaagaaaagaattccttattgatatgattcataggtatttcttactttacctaccaccccgccctttgggcacccaccccctccggctcccccgttatcgggggagagcaacctccgatggatgaggggaattgaaatactctatttatattggaatacccaattaattcatatccctacagaaatgaataaacatatcattccttgtgattgtaccagtcttcatatccggattctcctttcacccatttggtgaatcccggatattctccttccgaaccgattgtttttgtttctgttaccggaacgaagttgtgtatcgggatatccatagcaaacggatatttgccgtcacgatggatgtagtaggcatcatcatgtgtgtagttcagactcttgtcggcatagtccgtaggcatttgcttgggcagatgcacttcttgacggttgtttgctcccggcttgtagtgtactatgatatacggattataggctttgaggtcctgcttgttcaggctgccgctaaaagtgcgggttactatgaatttttgcttttgtacctcttttgcattcgggaacactacaatggactgtacttccggttcatatacagcgccctcaggtaatgctaattgtccaacctgagcggcattaatctgatatgcaaaggcattcaggaattgggcgccatcccatacaggagtaaatgtatcttttatttctgtcacgacgttgtttttgtcgaaggtcacagcacgggaatattcaataattacatcattcatgtcataatctccgccgctgggccagatgtcttcaaaaagtaaggttcctgcgtgaagttcggtaactggcttatcgtcaacaggcggaatcacagggcgttcgggatcgtagatagatcctttgggatctgcttcaatgtagaatagcatatcttcgtaactcttatctgttccgtcctctataccgtatattacgcgctcggtttcggagtccgtaatggcgacaaaactggattttccattgctgttccatgcctgattagagtaaatataccccagattgcccatgtatcccggtgtcaggttcacatcgttcggggtatgatctttgccataaccgttgccatagccattagatatcaggaaatatccgattgtataaccggctggaaacttatccgtaattgtcccgtcttctttttcaaacagtaactttactttgtttcctaatgccagaggtgcgtccagtcttctgtagagccactgtgggctggtgtttgcggctggcgaagcatatttttcattctcattgttcagcatgacgaaaggtacatttcctgtagttgatgcattcggaaaaatgatgaacttcttgacggcatccggggatatgggtacttctccctgtgggtaataataatatccgatggtattctgattccaggcattttcttccatgaaagtgaaatagatagctgcctctgtaatggtagaagtcgttccatcttcattcttggcatattgtgcaatggtagtatttacgtgtgtcacatctgtaatgaatttactattatccattgtggtgttattggggcgttcatcctgtccgttccagaaggtgcgttgaattttcttaatccagcttgcatccagtccggcgttcagtaaataatccgttggagctgtaatgcaaccatgttcaccccattggcaaagtgaatacatcttttgtccttgatctaccacgtagacaggcccctcacctgaacttaccgaacgggttccaaatgctgtgattcctcgggtttccgtgtaagtatagttgacgcttccattctccacttttagggtttcacagatggggagtccccagttgttggggcagagatacaaggtagtggcatctttaggtaaagtcattttgctgcttcgacgtccggatttgtctgcataaattttgaatttagcttcaatatcacgcttcgtataagagccgttctccgatacttcataaggaaactcagtgtagatttcaatcaatgcataggctcccagcgaaccgagatctacattcaggcctacatccgcacgtgtagtgaaatcaaagtactcttctgctgttttagtactgttcttcccgttgttagggttgtacacatcatctacgcaacttgccatccacagggttgcactaaaaaggacaaaggttttaaaagtggtttttctcataatacataatgtatagttgttattagacgccccaaatctaagtacaatatagattagcattattagtaaatgagtagaatctgcaagtttccctccgcaaccgtttgcgataatcctctcatttacatagatatagtgagaggggtataattagagttgcatttgatgatatattactgaggggaggtgtagtttctttgttttttagggctacaccctttcaccaaaagggtgtagctatttgtagtaaagggtgtagccatccggggtaaagggtgtagccatcttgaaatgggtttataactactctgaggtgacctcgctgggtcgcagcccgaaggatctacaagtcattttgcctatttttacttcccaaacctttacgttgcgcacggcaggttcgctgtatttaaattcatcgcttgtatattgccgcatgattatatcaagtacctctcttttttcatccatatcttcgatgaaacggacgtttccgtggcatatcacgctgcgcgacttcatgctgtaactgcatgccacctgccggtgcatatacaccagctcgtgtccttcgcagaaggtgatgcagacacgaggatgtctttctgccatcgttactttgctgccttcgggaccggagtgcagatagataattccgtccctgtaagcaaagttcatggggactacgtaagggttgccttccagatcggtgatgcccaccgtgcagtaaggacatttgcgaatgattgcttcaatttccgtcagttcggtgattgcaattgtcttcatagggctgaatgggtgttttattcggtgcaaaggtaatcattttattgacaaaccccagtcgtctgttgaagaagcgtgcgaaaagtcctacgatcaatgcggcaatgattgtaccttcgcgtacaccttctatgcttcctgctatcatcagagaagctgcacaggcaaggagtgccagtgtggtatcaaagccgatcttggtaattccgaattcttttcccgtgcgcagagtgatggctttcacaaaggcttctccggatagcatcactacattggcaattacctccatacttactcccaggccaagtatcgcacagccagctatcagtgatagaatctgcgaggcatagcccgtaggagtgaatcctcccaataatgccatcgagcaatctatgaagaaactgaagagtattgctacgggaatttgtagaaactgctcttttctgaagtcccttttcagaagccatatttgtccggctatcagcacggcattcagcagaagcgtgaactgtcccagtgtgacgggaaattttaaactcagtgtgtaaggaaggctcgatataggcgaggagcccaaatttgctttaataattaaactaataccaaacgcatttacaaataagcccgcaatgaaaaacagataccgggctgttaattctctttttgccatattacaatctttttttcttaagttcatcactgtatggttatgaattaaatgataattccaatattaagtaaatagagtatctcaattcccctcctccgccggaggaggggtgcccaaagggcggggtggtaggtaaagcaagaaatacctatgaaccatataaataaggaattattttctcacctaccacctcccccttcgggtactcctcctcccgagaggaggagaatcgagatagtattactttatcattttattcattactaatacgtatatatccaatctttgatgagcaaataaccaaaattattaaccgctgcaaagttacggcttctattgcctgtctcacggttcaaaaatcgaagcgaattgttcaaaaagtgggattattttgttcctaagttcctttaagactatatttgtacttcaaaaatagaactttatgagtgaggaataccagtttcatacccggcagaaatccgatttgttttcttatccttatcggatggagagaggggaattgctgttttgtctgcaaggaggagtacagctttacattaaccagcagaagtatgctttagctgccggaagtgtaatacttgttttccccgaacagattacgttttataaagatgctacagatgaccttgaactggccgtttttgctttttccgcccagttccgacatgagattttctattcattgccttcggataaggtatccttcatgcgtgagcataattatagttcattccgagacgaagagtgggatgggatatgcaatcattatcttaaacttctgcaacagaaatctgtggacagtgataatatgtatcaacgtgagctggtgatttactgttgccggatgctgttttatgagatctgtaatcagtcggagcgtctttaccggcaaacgaaaccgaatcatttgcgttggcggttgaaggaccgctttattgcgttagtgatagattcgttcagggaacagcgttcggtggattattatgcggataagctttgtgtcactacgcggcatctgagtaagacgattcaacaaacggtgggatgcacagcgaaagaatggatagacgattacgtgatacttgagcttaaagtgacacttcactctacagcactttccatacaggagatagctaatcagtttaatttccctgatcaatcctatctggggagatacttcaagcatcatacaggaatgtcgcccacggcttacagggagaattatggtgtataggaaaacgaaaatttaggcacggattacgcggaatacacagatttctttcattaatcaacaattcttgatccgtgtattccgcgtaatccgcgccttttattctaccagcgcaaagtccaactgtttcttttccagattggcccgtgctaccttaatcgtgattgtatcgcccaaactgtaggtacggtgcttacggcgcccgcgcagacagtagttcttctcgtcgaactcgtaatagtcatcgccaaggtcgcggataggtatcataccttcgcatttgttttcgttcagttcaacgtacagtccccattccgtaacaccggaaattacaccatcgaacacttgtcccagacgttccgtcataaattctacctgtttgtatttgatggaagcgcgttcggcgttggctgcaatttgttccatattgctggagtggtcgcagagatcttcgtatttggttgcggaaacgctgcgtccgccatccagatacttcgtcagtaagcggtgtaccatcatgtccggaaaacggcggatgggtgaggtgaaatgcgtgtagtattcgaatgccaatccataatgtccaatgttgtgcgtggaataacgtgctttctgcatggcacggatggatacggtttcaataagattctcttccttcttgccctgaatatcgtccaacagatggttgatggatttggaaacatctgtcttggtcccaccggtacgtatcttgtagccgaagcgggcgatgaattgtgccaggttatccagtttctccgggtctggaaggtcgtggatacggtaagggaataccttggccttcttgtttttcggtacgcgaccgattttttctgctacggtgcggttggcaagcaacatgaattcttccaccaacttgttggcatctttggaaactttgaagtagacgctgataggtttccctttttcatctatctcaaacttcacttcgtaacggtcgaagttgatggctccggctacaaaacgcttctgacgcagcgctttggcaatggtatccagcatgaggatttcttctttgaagtctccttctttcgtttctattacttgctgtgcttcctcgtaagtaaaacggcggtcggacttgattactgtatgtactacgcgcgagtctttcacatctcccttttcgttgatgttgaagataacggagtacgccagcttttcttcgtcgggacgcagggagcagatgaagttgcaaagacgttcgggaagcatcgggatggtacggtctacaagatacacggatgtagcgcgtttttcggcttccttgtcgatgatgctgccttcggttacgtaatgggtaacgtctgcgatgtgtacacctacttcccacaagccatctttcagtttgcggatggagagagcatcatcaaagtctttggcatccttcgggtcgatggtgaaggtagtcacatttcggaagtcctcgcgtttggcaatttcttcatcggatatttcagcggggattttgtccgcagctttttctacagaagaggggtagacataaggcagtccgaattcggcaaggatggcgtgcatctctgtggtgttgtcgcccgctttgcccaggatgtcgatgacttgcccgatggggtttttcgccttgtcgggccattccactactttcacgatggctttgtctcccgtctttccgcctttcagcttttctttggggatgaagatgtcattggcaagcgtacggttttccgtcaccaggaaggcgtatgaactacctacttccagtgtgcctacaaaggtgtcgttggcacgttccaatacttctatcacttctccttcggcttcgcagccacggcgtttggcgtagaaggaaatgcgtactttgtcattgttcatggcgtgtgccgaattacgctcggccacgaatatcgggtcacctccaccttcgggaatgaaagaattctttccgttgcttttacgctggaaagtgcctatcatttccactccatgattgttcagtttatatttgcttttctctacttcggtgatgtaatcatccagtagcatatcgcttagaatatccctacacagcatcttcagaggatgcgtggtaaggtggagttgttcgaatatgtatttcagggacagtacttcgtcgggttttgaatggaaaaaatccatcagtgcactcacaagctctttttttttcatacgcttgccggctttcttttctttgtttttagccataagttttctttctttatgaatgtattttgcaaagtaaacaaataatcggttagattggttgaaaatcatttaaattctgatagattccttatgaggtgagcgggaccgttatgctatactattaaaaacaaagtgcacctcaaagccttttgtcgggctttggatgcactttatgaaagacgtattctcttttgtgtgttagagagagaatttagttaagaattgagcaaaggaatttttcattttaaagaacgtacgacacggaaaccgatctgaccaaaccatatgtcacctccgggataacccatgtctgttttgatgtgagcgcccaagatacgtgcattggtattagagcagttcgtatcataagtagagaagcagcctccgcgcgaataaaccaggcgctcctcatctctgggcttctcaggaccccatgggtcagtttcctcagcatcactgatatatcctaactgaagaagccattcaccggtatattcttcaacatttcctgacatatcatagattcccaaagagttgggtttctttaatcctaccacatggagttcgggttcttcccctactatagagttctctccataccaacctacttcatcgaggttgttgctacctgcatagtaatagggttggttctcgttgtcgggaccgcctttggctgcgtattcccattcagcgctggtaggcaggcgataaccgttggctgttttatcgcgagttacatcagcctcatatagttcagtgttggtaacatcccataattcatttttgaatgtgtacaccggtttgtagcctttgcgttcgctcagtttattgcagtaaagcatggcttcatacaatgtcacggtatgtacgggcaacaggtcttttttcttgttgactgacgggttatagcccataacatcctggaactcacgttgtgtcacttcatagcgtcctatttcaaaagccgagatatttactttatgtgcattggttttatctgcgtacatactgcttaagtcacggccaatgataaatgagccagcgcttacggttaccatatcaaatgtggtatagttgggattgtcctcatcgtttcctccgctgggtggattgacaccaccggattgcagcgtaacaatggccatgtatgttttaacatttttctggtcggaagaaacgacagtatattgtacagcgtcagtgaagtcttgaactgtaccactggcaggagttacggtagctccttccgaaggtacaacaacaggttttagtgcagtgacatccgtaccggccggcatagtaattgtaatgacaggataatctattttagaagatatttgtcctggaatgataaaggctgtgatgtctgcagcagcaggttcttcctctttctctacacctttctgggtgatgataagcatgtaagtatccagcacttggtcgccaaaaagtgcggatatttctattgtggtctggcgtgcattttctgcattgtttttggctacagataaagagaggcggtttttgctgcacgtagccaaacaccacattttgtcggcagccgggacggtagctttcagagcaatgccatccatatctgctccggcagcgtcgcccagtgtgatgctgcttgtgagggtaccttctttagatattgacagaatgccgttttcttcatcgaaagacaggataccttcactaaaagcagacatcgaagctgttaactcaatgtgaggaacggtttgtttgtcgtcatcatcggaacaggcagtaaatgaaatgctgcataataggacgacaaggaagtagtaaaatttgtttaagttcataaaagtgtattttagttgttatttaatggttcttactacgcggaaaccgatggtgctatccgttgttgtaggatccattctatcggtatagtatacttttcctttggtatcatatgtggagtaatagccacccctgtagatttttgagtcattgagattctcggcaggaccaatcggatccgtttccggttccaaaggatattcataaccataaggtacgccgtagtcgtagcaccattcaccgacatttccactcatgtcataaattcctagttgattggcttttagttgggcaacttcgtgcagtgaagcattaccaccgatggctgaattatcttgccaccaacctacttcactatagttatcactgccagaaaagactgttaaattcttgcagccttcattacctccctttgcggcaaattcccattctgctgaagtcggaattctgtaaccgttggacacagtgcccggatcatagatatagtttggaatttctgtgactcctccgaaccaaatgtcttctattctgatggtaccttcttgtttgtaagcgggagtcagcccttctttttcactcagtttgttgcagaattcgcaggctttagaccaatctactttatttacgggataattgtctcctgtgaacttcttgtctgaaggattttcacccataatttctttatacagtttttgagtgatttcggtcgtagcgatatagaaactgctcacggtgacatcatgtgtataactttgactatagccttttccttctccgaacttgaaggttcctccttccactactaccatgtccatgctgctgttgaatttggcttgctttacacttaggtgtagagaggatatttctgtttcttctgttttgcctgttgcggcaatggtaagttctgcggtattgtccgatttggcagcagtgggagatatgcggatattcagtgttcctccggttaaatcagcggtgaaccatttggcgccttcaggaacggttagcgcatattctatatcaatagtctggtcctccagagtagtacctaccggtattttcacatcaccgccgacataagaaatatcgagtatgcctccttccagtttagtgttggcaggtgcagtcatctgatctgttttcaaaataacttctccttttggagttaccttagcaccctggttgattgtcagttccagtggagcgatctcggtaccggtagctactgctgtcagcgttgcagtggtggagcgaccttgcgcatctttggaaacattgatttcaatgttcagtttattgccggcaatagtagctttacaccatgctgcatctttggcaggaactgcaaccgtataagtaatgtcaagttcgtaatcttctaggccacaagtcaacggaatagagaaagtacctcctttaccatctacagtaagcgcattctgggttacagtcgccccttcgggggaagtcatgttttggatactgagtgcgatgttacctttcagtggatcatcgtcatcactacaggaagtgaacattatgcaaccggcaatcaatgccaggcatgtgttgagcaaatgataaactttcatactttgtgaaattttgattaatactatagttatttgtatcgtagttaattagccattggataatattgtacagctctgtatgctgtgaaatagttttccggatgatcgatatcagtgaatttaatccaattgggtgatttcttgtcatcagatgtcaatgtaaaggtgcgttggatatcattgccgaacggtgtgatcaacgcattgaatttaaagtctgtatagtagctctttccgatggttgaaccttcttcggagaacttcagagaaattttgtcttctccaatcagttcgtaatcgaaacccagatagccatgtccttgagcgcaaatgaattggaaggcatagtaagtacccaaaatattaatctcgttgcctaaataacaataagttatatcatcattattagcttcgagtgcttcgcgggatatatcccataaggcctgaccgtaaggactgaatccactgtaggtaaagaaccagttgcgactgaacaacatttcgttgacagaaggataagtagggatgaatgtgcctgtagcatcattggagggaatgaatgtaccatcttctcctaagtccggatttaagatcagaccttcgatgacattattacccaattgtacaggctgatagaatttacatcctgtcagggtgatgatgaacggttgatattcagtgatcgtttcttcccctttcttacgatagatacagagcgtatgtcctgtcaggcgtgtttctaaagactgttcttcatcttggtagagtaggcggtaatattcggagaactctttgtctttctgtttgatgtccttcaggtagtcactccattttagaccagtagacatgggggtcatcgtcatgtacgaaccgctcttttttcctttcagccggatgatttgttcatcggcttgtaatatggtgaattcaaagtctccttccagtccataaccctctcccatcccttggttgttggagggatcggagaaaaagtggagtatttcgttataagtgtcaaatgaaagtacgcatcctgcactttgtttcagggtataggtactgactgctgttttgtctgcgcctgcggtttcactggctacggtaactcggtaacccggctggaagttaagcaagacattgaaacctccataactttgcgtagaagagggataatactccattaaccaaccattgggtgagctgagtagaatttcttgtactgtttctatttcttcctcaatacggttggcggaagtgtcgtcaaaaatcggatctattttgggcgcacatgaaaagagtaacccggtggcgagaattgataatatataatgtgtcagtttcatactaaattcattattaaaggttttctaaatcaacttcagacaatgagccggagcggcgttgtacgatgtcgcgcaacttgtcaatgtcaatgccccaactgtcttttagatattttctcacgatatcaaactttttctgcagttttattttgccgagggctccaccgttattcagcacgttttcccagtaatcggcatcgtgggttatataattggaaataatctctacgaaatcttcatcaggtgagaaacttgcgtagcgggttatgaatcccatagtgttggcaatctcgtcactctcaagatttaaccaacttggtccctggtaatcggttgagatcaggttgaagtctgtagaataattctttgtttgatgcaatatatgtgcaaattcatgatgcatggttttaaagaaccaggtattcagaaaatcaatgttcggattattgacatccagttcgtttacattatacaaagtgattttcaaaccaccttctgccgttcccagtaccactgaaccttggctattgtatgcttttgaaccgatcagctgaatcattcgcggacaataagtcttgatgaatgtttctccgagtaattcgttataggaatctatccagagatacttggtcagtttggccatggcaacacatttgtcgtattcggcaggaatcagattgtacgtattgtctgattctttgtcaatatatttgtagttgaactgaatgttgtacggaacgatatagttgagcaatagccaagtatcgaatgcatttcgttcgggagattcagtattgaaaatgctgtgactgtccaatttgtcttcgttgcatgctcccaatacaatggaagcggcaaataataaagtatagatatattttttcatgtttcctccttattttagttgtttctcgggttggcttccaagcctgccgcaataacctcttgcggtatttgaatggcgcgacgcaggtcgtccactagtaatacgtcgtctgcttgtccgtctctgttgtgtgatatttcgattccgtatcgttttatatcattccagcgaaggccttcgtggacagtgatgatacggcgcatgtgcaaaaggcactgaatcagattctccgtatcactgtcggggattgtaaatccttgcggattgatttttttcttgatagttctatcgtcttcagacttcagatgtaagggcatatatttttttgccgtgtaataattaatcagttgttcttttgtgaaacttttgcccgtcatggagttcatcaatatgttgatgtctgctacggctttatcggcttcgggagcctgtttcagcaaataagcttctgcgcggcataataataattcgtcaatggagaaagctacatttaccagatgcagaaaaccgatgcctgctgtcttatcggtatattcaaagtagccgttcatttttgggaaagaatatttctgttcaaatccccaaataccgtttgacatgaagagttggttgtatgcaccccatggacccggtaagatttcattgagcaggatgttataagcattaccataacgtagccctattccgtaaggcccatgtacataaggccaggaagtctgtgcggtaatcaacattaggttgcatggttcggtatgtgcgatatagctgttgcatctgagttcgaaatccgttgcaagttcgctgaagcttttccagttgcggacatcatttaccgggttgtcaccaagtacagtactggcatattctattactttgtcgaatttcagataataaagattgaaacgggcagcaaaagcgtaagaagcacgtttgttgaagtggtatttaggaacagagtatacttcgtcgttaatcaagggtaatccttcttcaatatctctgttgatgttttcatacacctggctcagggtacctcgttctattccgtcaggcatcacttctgtttcgggtaccgtggtgtaaggtatcccgagttcctgatccgcagtttgcgggttatatggcatacagaataggttggcaagctggaagtgagcgtacgcacggcatagtagcgcttcgcctttctgtggattcaggttttccgggtttcccatcagttcaatggcatgtagggcttgattggccgaacagatggcattataatgtgcgtcccatatatatttgggtgcgtcagtatcctcggaagtcatgtcattccataaataggcatcccgttgtatctgtccgtatatgtcatacaacgcaccgttgtctttggcattgtcggaagcgagttcggagatgagaatagttgatacttccggataagcggataccagtatattggtgattttctgttcagaatctatttctgttctgtcatcaggtatagtatccagaaagtcattacaagaagccaatgcaaataaggaaccagccagtaatatatatgttcttatattattcatatcaagtcgtttttttaattaaatacctaatcttaatgtcaaagtgaactgttgtggaacaggagaggccacaccaccggtattgaaaaattcaggatcttgtccgttcaactttttgtccgaatagatgagaaatgcattcgtagcttgaagctttaaggacaagtcactgactcctgctctaactatcagttttttagggaaattgtaggttaaagaaatttctttcatccggataaagtcccctttggctatacgggccgtagaatagttataggcgttataagcatagctcagatagggatcctgctgattggcgcgtttatcggcaattaccgggatatcggtatacttttcatctccgcctttagtccagcggtttatgaattctctgggcatagcatccagatcactgtactggttgtggaatacaggatctagtctgattacattgccgaaggaatatgtgatgaagaggttcagcaggaagttcttatacttgaaactgtttccaaaacttccggtgatggtcggatcggttggaccttcgtaaataaggtggtcttttttaattcgttcctgaaagttaatgttgctgactgtcaggtttccatcttcgttgatgaaggtaggatagccactctcattcaatccacggaaatccatggagaagagagagcggacaggataaccttccaatgcaaatccgcttccactgatcatttcgattaccgaagaattggattgaaggtcggttacttcattcttggtatttgagaagataaaatccgtattccaactgaaatcttttttcttgatgttctgtgtggacaaagtgaattcaataccatgtgatttcatactggctacattggccagtttggtgagttgtccgcccgttcctttggtattgatgatacctatcaggtcgtaattgttacgtttgtaccagtcgacggccagattaatgcggttattcagaaaacctatttcagctccgatattcaactcatgctttttctcgtaagtaagttcctggttttctatattcacaactctcaggccggactctttgatggaagtgaatggacgccaagtgttgtaactttgaatgatagcacgggagttactggccgaagccggtccacggtcagcagtcagagagtaggaggctttcagggtcatatttgaaacgtagttgagcagaggttgccagaacttttcttcatgggcattccaagcggctgataaattccaggtgggaagccagcgagccgatctgcttttacccagtttattggaaccttcgtatcgtaacgtaccgttcagggtatatttcccttggtaagaataagttgccgtaccgaagaatgacacttcgcgttgacgggttctttctacggtatagtattgggcgttttcttcactgccttgtttgaagtactgatattcgtaggccggaagcattcccatttcatattgcataccgactccgttgaaccaggttctttgacggtttacggcattgacttccatacctccgaagaaattgaagatgtgattttcgttatacacgtcattgtagctggctgttccacggaaatcataactatccattgagtatttggtttctctgtaaaatccgcccactggtagcacggacaccggcagtgtgttggcattttccggatcggtataaagccatggatttgcctgccgcatcgtagcatcatccatagcgcggaaagcccatgcctgatttgaataatctttgatggtgtgtgactgtgtagtcatagaagttttgtaggctcccaaagcagataactcgattttattaataggtttccatttcagttctccctggaatttgagatcggttacgtttaagtcaatgtaattgttgttcagctcatgcagaatgttgaaaggcgcatagttacgtacataataagcatcagggtcgagtgtacgtgaggtgttcagggcataactatacgggttgatgtcaaagtcgcgtttcacttctccgctgacagggtcgacagaagagcttaatgttcccggagctttctgtttacggtaagaagcattgctgatcagattgagtgataaggatttactgatatggtatagtgcgtttacattagcagtataacgctttacttcgcttttattagtccatcccggatcattcatgatgcttaatgaagtgtagtaagatgctttttcagtaccggtagagaaactgatggcgtggttttgtgagatgctgctgttgaacaggagatcgaaccagtttgtatttctgaattctgcttcctgtaaatactggttacgtgcctcttccgtattcatcagcccgtatgaatcggtttttgcatcgtaatcgttgatcagatgatacatttttccatatataccactatttgaggcccggtacatatcggcaagatttaaatatcccgcattgtccagctctttataaacacccatctgttcttgcgaattcaaaatattgaaatgcctatagttgggttttaatctcattgtgtattctccggtataggtgattttgctgcttccggcttttccttttttagtggtaacaacgattacccccgccatagcccgggctccatagatagaggtggcagaaccgtcttttaatatctggaaactttcaatgtcatctgcatttaatccggcaatggcagaactgatgagagtgacggcatctcccgaagacaaattatctgcgtctacttcggttacatcttccataatgactccatccactacccatagcggtttggagctaccgtatatggaagttgctccgcgtacgcggattttaggggcggtaccgaaagttcctgatacgttctggacggatacaccggcggcacgcccttccagtgcacggctgatttcgggtataccatccagcttgatattctcagctgagagttttgtggcggcacccgtaaataaccgtttatccattttctgcataccggtaactactacttccgacagtgtctgtacatcagacaccagtgtgatgttcattttaggagaagcctttacttcttgaggcaccataccaatataggagaactgcaggattgaattgctggctactttctcgatatggaatcgtccgtcaatgtctgtcagtactcccgttttgctccctttgatcagaatggttgcgccaatcaatggtaatccgtcgtcttgtgaaataacggttcctgtgacatcaaaaatcttaggctgtttggagttcttggaagtgatagtgataaattgatcctcaatatgatactccaaaggcttatcgtttaggatgatctccagtatctctttaattcctttgttcttggcagaaccggatacggtatactttttgatatcgtcatacgtgaacaggattttatatcccgataccttttccaaacgtttcaataaagaaggcagacgttcattattgaactcaattgtaatctctgttttaggtgtagttgtttgtgcatttgcttggggtgacaagaggcaaatacatgcaatacaagtgataaataaataccattttcttctcatatattctaattttataacacaaattctttttcgttatattattagttcgtatgagaataaaaaaaagacaccccttttgctgaattttcttagaaaaaagtgttattttgtttagttatcgtcttattggatgtttttatgatacgtattttagtctataactattgtattgtttcttatggtggctgttacctttttcatttgattaagtaactttaaggtatgctccaactgcttcgcacggtcagaaacgaaatgcattttatatttcattgcatctgggtttctgaattcgatgtttacgttgtaccatcgcccgatattttccataatatctttcaaagtgacatcatcgaaatagaaaaaaccgtctttccaatagatatatgaatctaagtccacttcggtcataatgaaatttccgtcaggttgcaggtgggcatcttctccgggaatcagacgtgtataggcgttatcttttgtattgctgacttctacctttccgctaatcagaacaatatgagtgtcttccggtgagtaacttcgtatattgaattctgttcctaatactcgggtttgtacatgaggtgttttgacgatgaacggatgttctgtgtctttggcaactttaaagtatgcttctccattcagggttactgtgcgttcttttcctacgaaagtggtagggtaaacgaaatgagtgttggcatttaaccatacttcggtgccatcgcacaaagtaattttgaaggtttctcctctgggcactgtgagggtatgtgtgtgtaatactacatctttcgttttagaaggatagctaagttctttagaagcggattgcgctttttgaggaatattggtctgatgttctgccagtacaattttttctccatctcctttatctaaaatcacttgttggggtgagttgtcggcagtgaatacgataacgggcgccgtgtttgctatctcctgctgatgactgatgtaatgataaatcccgatgcaaaggacaatggaagcagcaatactgatacttgttttccagaaagtatgtatcttttgtttttgatgtctttttttgaagcgggcaagttcggcttctacattcagttgcatgtctctttttccggcatgcagaaaaaactgggtgtctagaatatcttgggctgcctgtctgctttccttgtccagaagcatctcctgtaattgttcatctgtgatatctgtagaaggctccatagcatccattgccttttcaataggggcttctaactttatgtgatcaatttctttactcatagtgtcattggtttttggtatattattttatatcgtttttgccttacaatcagacaccctctttatgatttattaaacattctttacgtatcgtttgtagcgctttcacaatatgcttccttactgcacttacgctgatattcaattcttcggccacttcctgatatttctttttttctacatagcattcttctaaaatatgtttggtatgtggagtgagtttctgcatagctttctgaatggccaacattttctcgtcccattcttgataatcggtttctacataatcttgggtaaggttagtatataattgtacgaactgctgatgcacattttgatgtcggagataatcaatacttttattacgcacatatgtatataaataggacttgaccgttactttgttcactttgccatagttattccacagaaactcgaaagcatcgcttacgatgtctttactagcctctatatcgtttatcagatgataagcataataatatagttgaggataatattctttgaaaagaatatcaatgccggttttatctttcactcgtaaaagtattgaatagtaaataaatcgatgtgcaaataaacaaataataattgagaaatgcaatatagcttttattttagtatatttgcggcaaatttttcttaatcagtaagtatgaaatgagtgcagaaactgcttctctgtctcgggagaaggaaatatacaaagtaacgattgtcggtagtattgctaactttgtgctacttgcctttaagtttgtggcaggtattctaggccatagtgctgctatgttggcagatgcagttcattctttatctgattttgtgacggatgtcattgtgctcgtgtttgtccgtatttccaataaacctcaggataaagatcatgattatggacatgggaagtatgaaacgttagccaccgctattattggaattctattattactggtgggatttggcattttgtggaatggtgctttttctatttgggcttttatgaaaggagaacaactggaggcacctggaatggtggcactgatagctgctcttatttctattttgctgaaggagatattatatcaatatacagttattaaggggaagaatttgaattcacaggcagtagtagccaatgcctggcaccatcggagcgacgctttttcgtctataggaacggctataggtattggaggtgcaatcttgttgggcgaacattggcgggtactcgatccgatagctgctgtgattgtcagtttctttataatgaaggtagctattcaactgttgattccttgtgttgacgagttgcttgaaaagtctttgccggatgaagtggagaaagatattgagcaagcattgctctcttttcccggagttagtgagccgcatcatctccgtacgaggcgtatcggtagttattgtgcgattgaggtacatgtgcgcatggacggggggattacgttggaagaagctcatactatggctacggctattgaacataaattaaaaacaatgcttggcgaaggtacgctgattaatattcatgtagaacccaagaagtaatggaaagtatattaataacaggagccagtggatttatcggaagtttcatcgtggaagaggcgttgaagcggaagttcggtgtgtgggcgggtatccgttcgagcagcagccgggaatatctgcgaaaccgtaagatacacattctggaactggattttgcacaccccaatgaattacgtgcgcagctttccggccataagggaacatataataagttcgattatatcatccattgtgccggtgtcaccaaatgtaccgacaaacgggagtttgaccgggtgaattatttgcagacgaaatactttgtcgatactcttcgtgaactgaatatgataccgaagcaatttatctatatcagtacgctgagcgtgtttggccctgttcatgagaaaacttatcagccgattacggaagaagactcccctatgcccaatactgcttacgggctgagtaaacttaaagcggagctttatttgcaaagtattcccgcttttccttatgtcatctatcgccccacgggagtgtacggtccgcgtgaaaaagattattacctgatggctaagtccatcaagcagcacacggactttgctgttggctttcgccggcaggatctgacatttgtttatgtgaaagatattgtgcaggctgtattcctcggtattgaaaaacaggcatgccgacgtgtctatttcctggcagacggacaggtgtaccgtagccgagctttttccgacctgatccgaaaagaattgggtaatccgtttgtaattcgggtgatatgcccattaattatattgaaagttgtatctttgctcgctgaattctgggcggtgcgtagcaagaagcccagcactctcaattctgataagtataacataatgaaacaacgcaattggcaatgtgacatcggcccggctgtaagagagttgggatttgcacctcagtacaatctggaacaaggtgtaagggagactattgcctggtataagaacgagggatggctttagatttatttaaaaaggtagaaacccggaaggggttatttgcagttgagaagataacacttatatataatttgttgacttcgattttgatcttgtttctttttcaggaaatggatcatccggtgcagatgttgattgaccgcgcaatgattgcgggcatgacgtttttattgatgtatctttaccgactggcaccctgtaagttttccgcctttgtgcgtattgctatccagatgtccttgctttcctattggtatcccgatacgtttgagttcaaccggatatttccgaatctggaccatgtgtttgcttcagtagagcagtggatgttcaacgggcagccggcggtatggttctgcctccgtttcccgcatatgtgggtaagtgagccgttcaatatgggatatttcttctactatccgatgattttgattgtggtagtgtggtattttatttatcgttttgaacttttcgagaagttgtcgttcgtgctggtcacctctttctttatctattatctgatttatatttttgttccggtggcagggccgcagttctatttcccggctatcggcgatgataatgtggcgcagggtgtgtttccttccatcggagattacttcaatcataatcaggagttactgcccggaccgggatacgatcatggattcttttacaatctggtagagggttctcagcaaatcggtgaacgccctacagctgctttccccagttcgcatgtgggaatttccactatcctgatgattatggcgtggcgtggtagccgcaggttatttgcctgtctgtttcctttctatgtactgctttgttgtgccacggtgtacattcaggcgcactatttgattgattcgattgtaggatttgtttctgctttcggactgtatgtgatggtgacgtggatgttcaagagatggtttgcacagccgatgtttaagtaaggtagcatctatatatcctacgtgtcccatctatatatcctacgcatcccatctatatgacggacgtgcagcatctatatatcctacgccaccgatatatagatgctaaaggaacagtatgtatagcatagacagtggtactaagacaagaagcactcataccgtcggcaataaaccggatatagataatatgtaagattattcttataatagtgtgaactcgatataattaaaatagtgtaggttgcccgtccttgataaatttatatcaatgacgggtttcttatttaatacgagtccttctgtgaccgagtatgtttgttctaataaacagtcagcccttgctttgtttgtgctgacaaagcaagggctgagaaaacaatactaaggtccgtatcgttttatttcacactttttgtagttgttcccggtggaacattatcgtctcctcccggtgtagtgcgttcggtacggaaagtagtgtaataactatatcccaccccatttttatttttggcataagcacgtacataatagtaagtatatgctttcaaaccggtaaggttgacggtgaaagtcttactctccttatccaaagtggctttcacatgactgtccttatctatggttggttctgaagtgttttcactccaacagaagcctacttcactgatttcaagttcttcgcttccgtcgccgccatcactggcaatcttgccttccatggtggcagtagtgctgcctatcgacccctcttttaccgatgcgttggtattcggggtagaagaggtggaagtaaagaagttggtggccgaactataggatgtgcctttggcattggtggcataagcacagatatagtagcgtttctgataggttaatcctgtcaattcggcggtgaaggtgtcatcggtggattgggatactattttgaggactcccgctgcacctatagtagggctgactactgtggtggaatatacaaatcctttttcagtgatttcaaggccacctttatcagaaataacagcttgggcagtggaatgatcgtcgtggacggcagtcattgccatgttcactacttcaggagcttttgtcaaggcagtggtaaactcgaaggcaggactgtagccggtgccgtttacgtttttggcgtaggcacgtacgtaatatttctgtcctttggtcagcgaagtcagttttaggctgaagttgtttcctgtaccttcggctttcataaatgcatcgttttcgagggtaggagtcgaggaggtactactccaacagattcctttttctgtgatatcacgtccgccatcagtcttaatagtggcatttacggttgcttccgtttcacctactccggtgacttcggagatggcaacagtaggttcatacgtgcgtcccagagtgaattgggtagcttcgctgtagaatgtaccgtcgcgtgttgtggcataagcggtggcatagtaagtagcgccctcgttcagatctttcaggtttacactgatagcgtttccttgactgctatcaacggtgtgttgcccatctgttgccggtttggtagagaaaatactgtaacagatacctttctccgtaacttctacacccgaaggcactgtgatggtactgcttaaagtggcagaggttacttcgatcttgcttgcttcgggcttggtcagggtagccacctgtttttgttcagtcttgaaggtgaggatgttgctatatcccgtacccttctcattggtggcataagcgcgcagatagtaagttgtttcggggttcagatcctctatgacttcactgaagttggctgtttcactattgccggtcactgtcttcaggttttcgatggtgggtacttggctttcagtactccaacagaaaccatattcggtcagcttgaagcctccgttggtgctgacggtggccgaaggcgtggcggcaaaagccgtaacggtgcccatgctgcatgtcagttgaggaatcttcaactcttcggttgtgaaagtgacggcctctccatatccggttcccgccttgttgatggcgaaagctctgacgatgtacttggttttggcttgcaggtcggaaatctggacactgaaagtttcggcttccaggctgacggaccgggttttgtcagacgtggttggctccggcataccttcctgataaactttgtaagcaaacccgcgttgtgtaacgttttgtcctccattatcggtgatgtcgctgcttagcaatgctccattttcattgatgttggtggcgatggttgctgccggtacaggggcagtacttgagagggtctcaaacttaattacttcgcctttagctatgctgcctccactgcgggcacaaatgctgtaacagtattcatttcccggagttaatccgtcaatggtacagacgtatctgccttccgtcgtattgtccggggtggctgtaaattcttccgcatcgactaaagtatttcctttggcaaaaaggaagaatacctctgctttcacaacgctgtttgcatgtggcacaacgctaccggagagaagggcctcgaaacgggtcagctctgcggcgctgttggtcaccagcgtgggcggatatgtctgcggctctttgtcctcactgcaacctatcaggcagaatagaagcaataaagggagaaccacgttctttatctgatttattttcattgtaattcgcttgtttagtaggttagaatacaaatcccagaccggcggttgcttcgtgatacttgaaatttacagtgtggaaacctgccgaaatacagaacttgccgaaacgcaggataccacccagttcaccggctacacctgtggctgagttatccatatctttcacctgtgtgccttcagcatattctttgtcacctattgtcattggagctgccagttcgtaggtcagtgtgcgagtaccgtatccggcaccggcatagagatagaacttcttgcccagttgacggaagtaaccgcctgtgatagacatgcgtgatttgtttttcgttccttctttatagaaaggagcggtagtttcttcactacctgttatgatgccgttctcatcgcattccagttcaccgcttgccgaaccgaagtcgctacggaaacctacatagaaaccgttcttgcgtccgaatcccagcatggcaccaaaggtggttccattaggattgtatccggcctgaagcatgacgagagtattcatcggtactttaggcttgatagtagattccatgtggaaggtggggcgaactgtttcaccggcggtcacgttcagtagcgtgtcgatggggaagtaagtttgcttctcgatgcgtactttgtattccttgatggccatacggtcgctgcggtaaggggttttacctaccagaacgctgtcgatataaacgtcggcatcctgttcgggcagtgagaagatttctacgtagccgaacttgggtttcagggtgacactcttgattacctgttcgctgcccaatgtaacgattccggcatccggttgatacatgggagcttctacacggtaagtatgttcgcctttgggcatggttgcagagaagagtccgttttcgataggcacttgttcatcatctacatacacgttggcgttggcaggttcgggacgcagtacgaagaactgcatgttgttttctacaacgggcttgtcttcgctgtctccggtgttcagcaccatttcgtatacggtgcctttttcaatgatgtccggatagaagtagtttcgcaggatacccagctggtcatgcaggatagagatacgacgtgcgccacggggaacgtaaagccagatttctccgattttgttctcacgtgccgtgatgccgagtgcgtcaggttcaaacatcaggtccttcacgttggtcacgatacggatcaaggcgcagacctcaccgttctggtctttctttggggcggttacgcgtgccgtgatgtccgtttccattcggttaaacgatgctacggctattttgctttgttgcgccagtgcgacggggcagcagatcactgctaccactaccgctgccagccagcatttcagtttgtttgatttcattctattgttcgtttattcacgtttctatttcgtactcaattctcttggttatcgtccgataacgactttctgaccttccagcaagtagatgccactgtccagtccgtgcacctcgttcatgccttcgcgggcttcaatgatgcgtacggtacgtccggtaacgtcgtagatgttgatggtacggtcagcgtttgtgttgatgtagaggacgccgttacggctataagcttttgttgctttttccggagtggcgaatggaatgtcttcgatgccggtgatagtgccatcactgccaccgatactgtaaagcatgggggcactggctactgaggtcttgccttcgttagtggctagataggcgcggaaaggataaacggcgggatagctggaataattctcattataattctttataaatacactaccggcaggataattcttttcatcgccataataccagttgttttcattcaagacatatacagtatcatgttgcattactccgtcatatgttggtaccagatcgaatttggttcctttactacgtttcaatactccttgggtggttccaagtgtgatgccattggctgcatcggaggcagcaaacttaacttcaccattgatattgttttcactgggatacttatcattattcggcatacagatcagataagcttgatgtgccttgatttcagtggcagctttatacttaccgtctgttcctaattcatagagccagaaaggcagtgttccggcagtttccagagctttgcttccgaagggggccagtgcaatggtttcttgttcttggctatatcgtttagagtaggtgatttccttcacattgaaaggcaacacaattgtttgccagccggcagcttctccgtaaccacttgtctggttgaagtttctggcataagttaccttctttgtcttcatagccttgctgacagagtagcggttgtttgagtaagcaatggcaatcgaatcagtaataccattgtagaagatatatccaatgttgtctttgctgctaattgttccgtccgtaggtaaatagagattatctatctggccgaatttatctttggggaactgggtggaagaattccaataaacgttggatagatgatagtagttactgtgtccgttctcataataactgccttcacaacggaaagctgaatttcccatttgtatattctcagaaggggtgatctccaaggagttcctaatattagcactatagaatgcactattacctatagaggttacattacttggtatcacgacttgatcgtaagttccattactgaaagcttcttctccaatgctcgtaactttagccggtattgttaagttattgattcgactgctatttaaagcatatctaccgatagaagtcaaagctgccggtagattgatttcttggatgatgcaattgcggaaggcataatcttctaatgaagttactgtttccggtaattttacagtgcgcaagctatctgtatacgcaaaccaatccttaatagaagttagtgaagtagctgaaaaatcgatgctctttatctttttgcagttattgaaagcattatccttaattgtgctgaaaccggcaggtaaggttaatgaagccaatgaaaaattctctgcaaaagcataattgctgatagttgttaaggtagtagggaacttaacactgcgtaggctatcgcaatcataaaaagcataatcaggtatttcctccagtttgcagccggataaatctatgcttcttaacttttggcatttatagaatgtacagaaaccgagtgctgttaaagcggcttttcccatatcaatgctttctagcttactacaattataaaatagtcctcttgctgcactttcataatacttttcttcgagatagaaactcttctgctcggtgttaattatttgggtcaaagagttaggtaatttgatacttactaaactattgcaattagcaaatgtaccataatagagttcctttagtccttcaggtaggctaattgaagtaatgccagtttcgcggaaactgttgtctccaatataagatagagtggtaggtagcgttacagtttttaaactggagcaacgagcaaaagctgcactttgaataccttttacgcctgaagggatggagatgcttttcaatgatcgacaaccatagaatgtagaagtaagaatggagtctatggcagtgggcagagtaatattttgcaaagtatcgcaactaaagaatgcctttttgccaatctttttgatagaattgggtagggttacagttaataaactgtcgcaattggcaaatgcaccttcactgatggcttccggtgctgctccttctgcaaaaagtatattcttaacaccggtattgctgaagccgccgattgttttcatactgggtgggaaagttacggtctttagcaggttacaaccagagaaagaattattattgaggctaacaacaccatcacttaagataacttctgtcaatccactgtttcgaaatgctccttcattgatagtctgtacgccaccagggattgttacctttcctaacgaactacatccatcgaatgcataatcttgtatggtcatgagaccgctgggaagaacaatatctttcaactttttgcagttctggaatgtataggagtagatatccgttacgttaggagggaagttgaggctttctaagtccttacagttttgaaacgcatacgccttgatttctgttagactttgaggtagttggactttctttaaagctgtattagcaaaagtataaatacttaataatacaagtttattgggtagagtgatttcgctcaatgcggtacagttttggaaggcacagtttccgattgttcctgtttctgtagaaagaatgaccttatttaatgcggtacaattacggtatttacaaccgattattactcaatattttatagataataagtcagaaatatggttgttatttttaattgcacattctaaaaggtgaagatttaacgcttttattgattattaactcaaaaaggacatcaacttgggtcgtttcttctcttttccttgctattcgtttccgatattccacttttgttttggtctatctcatatgtactgcaaaggtattgatttttgtttgatattgctccttgcttgctccttgtcgtagattaattttcacacaggaatttttgttctctttctataggggcttgaaacaatccatttattggaaacaattaaagacggagctggtttgccccagtgctttttaagaaacagggcaattattttatctccacaaaggctcttgttcccaattatgaggaaagcctaataaacgagttcttactgatgggtatttcgataaaagctgcttgaaatctgcaacaaaagtgttgcccatagaaatggagttaagccaatacaccacatagcagagttgcggataaagtgtttgttcacggaacgagaaatccgtaatccatgtgtttggcatacgcataggcatcattggcttgacaggaaagacccgatttgacagtcttgaatgatgggcgcagcaattacgaagtacgggtctgggtacggattaaaaggctaagtgattatttccagtcatttagcctttttaattatctaatttttccccacattttccccacagctgtctatttatatattttagaaacatatttttccgtaaagttatgtacctttgtcggcaaataaagatattctcgtcaaacaaatataaataatataaacatggaaaaaaacagaaaaaaacaaatcgtagttttgagttttccgtaaagttatgtacctttgtcggcaaataaagatattctcgtcaaacaaatataaataatataaacatggaaaaaaacagaaaaaaacaaatcgtagttttgagtatagctttagtttgcattttcatcttggtattttcattgttccataaatcagcgacaaaagatagcgcaaatcctcctttaacaaatgttttgactgatagcatttctcaaattgtctcagcttgtcctggcgaaattggtgtggcggttattgttaataacagagatacggttaaggtcaataataagagtgtttatcctatgatgagtgtgtttaaggttcatcaggcattagctctttgtaatgactttgacaataaaggaatttcacttgataccttagtaaatataaatagggataaacttgacccaaagacttggagtcctatgctgaaagattattcagggccagtcatatcattgacagtgagagatttgctgcgttatactcttactcagagtgacaacaatgcaagcaaccttatgtttaaggatatggttaatgtcgctcaaacagatagttttatagccacactcattcctcgttcaagttttcagatagcttatacggaagaggaaatgtcggctgaccataacaaggcttactctaactatacatctcctcttggtgctgcaatgttgatgaatcgtttgtttactgaaggtcttatcgatgatgagaaacaaagtttcattaagaatacgttaaaagaatgcaaaacaggtgtagataggatagcagctccacttcttgataaagaaggggttgttatagcgcataagacaggttcaggttctgttaatgaaaatggtgttcttgcagctcacaatgatgttgcctatatatgtctgcctaataatatcagttataccttagcggtatttgttaaggatttcaagggaaatgaatcacaagcgtcacaatatgttgcgcatatatcagctgtagtatattctttattaatgcaaacttcagtaaaatcttaaactgcacttgctttgataattaatgataaacaatctaaaagcactctaatcgttatcggagtgcttttagattactaatcaaattgcttctattataatttgaatcctctactttttctttcttcctgttgcggcactcttgctccatatctaagcctgtgccattgctccctgaaccagtcggcaatcggcttcctgtttattgtcaggttcagcctgctttcatcgtcagggtcattttccacccttaaaatatcatcctttatatcaaagttccgcctgtgttgctcggaatagattttaccgctacatttcagggcttcttttttgactataagactttcagtcatttctttagagaatcccagcatggcacaaaacttttccatgcgcagcatttccctgaacatcggaaaccacctgaaagccttgtctatgattctggcgagccgtgacagttctttttctttcatgtcaagttcctgcctgtgcatttctctgagattgtggatttgcgtatcatgctgtttctgcatctgctgtacttggctctgcaatttttcaatattggtgttccgttttgaaacctcgtcttgcagtttttcgttggcacgttccagttctttcagttttccactcccgaaaagagaagcaactccactagttatggctgtcgctgccgtggtggctgtcttctttaacttgtcagtgcgtatttctgatttcacctgtttcagttcctgctcggcaagatttatctgttcttctttgtgccgtttggctgcatccatgcgttgcagttcagctttctgcttctcaatgataaagtcgttccgttccagatgctccttaccagtgacagcctttgactgcccgcgttccatcagcaggatgtcggatgcaagggtctgcatctgcatcatgtcatcgtcattgagctttcggctctttcctgtttcgtggttcatccagtcgaaaacgatatgggcatgatagttcggcttgaaccatctgtccccgactttgaagctttccctgtcttccgcttccggctgaccgttcagccaatgcccttcatccttgtgcaggaagatttgcagcggtgtgattccccagcgtctttgacactcctcaccgaatttacgcacgtctgccagtgtggtgtccgacctgacaagcagcactccttcacgtatgggggagcatcccgcaatcttgactattttaccgttcttgcctttgcgttcacgctccttttcctgcatggcacgtccggtcttttcctttaccatctgtctgatattgtcataatgcatccgcaaatccggactgccgaagtcgggatttatccactgttcgttatcggtggatagttcaggaacgacatagattctggactctccgatgtggcgcatgtattcggcagtcctcctgttgtgagcctcgctcgatgcgatgttgcagggcttgatatgtatgcttgattttgttgccatagatacttgttttttggtttgtactttattgtttgcttttccgctgtccgtaaacgcatggggttcttaggggtgcaacccataagcggagattgcaaagagagggtcactctttgctctgggttctcaggggagaaacgccctgagtgggtcattagggtaaaaccctaatcccctcgggagagcccacaactacgtaagcggagcgtgtagttatagtgggctatatcaatggcaagccattgtctgcaaactccagcctacggcttccgctctcctccgtcagggaggtttttcatcatcgttgccgattggagatgcaccgaccagcacaaggtctaaatcgtctatcagtttttgcaggacgggattcttctctatcatccgctggaggattctctcagcctcgaccaagtggttggctgtactcatcaccttgccctcccgtatctgaaagataatccaatcggctatgtcgatatgggcttctttttgtttcggggtggcattcctttcgatgatgtccgaaaccaccaccttacaaaagtacatgctctcggctcgctgtttccactcggcataagcatcggcatcgggaaagagaagcacggttcgccctgacagtacacggagtttctcttctctcatctgactcttaccacccgtagccagccatacataatcggggaagatagcagaaccgataacggcactcttctcggattccaccaagaccaccaccttgtcgggatgcgttttcaacaagtgttccccgaaaaggcattgggatagttgccaatcctctgccaacacacgctgctttttcaatatgctgtgtatccagttcactgccgatgtctgtcctcccttgatacggtgtccgtcttcgggattgtactgcatcacctttcccgtgcgtaccttgcccgtcctgtctatctgccaaaagataacagagccgtcacgggtagcccccaaacggtattcctccaacaaccgcttcaacacctctttcgccttgtcgccatagtaggaagtaaggagtgtgaagaggaaacggaagaaattgctacgctcgctttgcgacttctccacatagtgagggggaatatagccgatggctgtcggcttactttgctgcttcactttcttctgctctgctctttgcctgtcaaaagagaaatcattggtagttctgtgttcaggatgctcttgaaaatactctttcggagtgtagtgatacccacaaccgctttcgtggttacatctgccgaccgatggatgcaacggcacattattttcgtccacgtaatagacgaaagaatgcctgtctccgcatttggggcaggtatgccgtgttgccgttcctttatacttctgtaatgaataattgcccatagcttagtccgtttttgatggttgattgtcggctgtcccatcctgtcccattgtcccacactctaagggttgggacagtgggacacttgggacacctgcgtttttactctctttgctgcgctggatgatacggtttacggtggacttgccacaattcacctgtgaggctatctccctgacggacttgcccgattgggagagttgcagaatttggcaatccctttggcttgattcattgtcgcccaattttttcaagtgttccttttccgtggaatagcccctgaacacgaactgcaagaaagcatccaccttgtcaatctcgtaaacgattacattatccgcatcatgagagaacgtgccatagcgcactttaagctgcttcacatagcgaagccctccgtcttgggcactttttccaatggtgaacacgctgtcaaagaaattgtagagccgtttgcttccggcaaggtcgttggatgtgatgggacaatccaaagagcgtttgggcgtatgtgctaggacaaggatagagagcgcatatctctttttgagattgttcagctgaatcatcagccgtcctgcggcatcgcctttctccatggcgcaacacaggtaggtaagattgtcaatgatgaaaatcttgcagtcggtctgcacagccatctgttcaatgccgcctatgatagcttcctcaaagttggcatccaaaagctggttgcagtcaatagacacccgatagagtttgtcgggaaaggtgtagagctctccatgctcgttggtatagcggagctggaactgcttttcggacagttcaaagtccagatacagcacattgtcggttcgggcgatgcggtcggctatctgcacggcaaggatggacttgcccacgttggaatcggcaaacaagcaggagagttccccctcgtaccaaaagctgtcccacagcgcacggggcgtaggcaataacgatgcttcaagaatggtttggtttgccgtcttgatattcatcatgcctacactgtcgggcataccgttatgcgcttgggatgcttttgtgaggtcgccacgtatcaggttgatatagttcttatcctcttccatatcattcaccagttacgtgggttgggcttgcgacggtgggaagaggataaggacttgttcagttcctcgtctgacaacggtatgggattctttcgggcggtttccagccacttgtccagttcgtcacggtaaaggcaatagcgtttgccgggcttggtggcagggattgtcccttctgacagtttcatgtagagcgtacccttagggatacctaaatactctgctgcctcgtccacagacatgggcacgtgggtgtccaccgttttggcattgttcacactgcgctgctcggcgagcaggcttttcaggctcatcacttcgtctcgaagctgagcgacaacctcggggaggtcgttgaaggtaagaattgatttttccattcgcgtactcgtctcttttgtaagacttggcgcaaaggactgaaatgatatatccgtgaatatctccacgacacgtcattgcaaaataattcccgaataattaagcccagccataaatgacgggtaaaattactcgggaaacgatgtaaaacaggcggttatgagttaccggatggttgtcgttggtgtcgtgattatcctaattccgcacataatcctcgggatagtggaaatcaagtttgccgttttcgggttcatcaatgggaatttccgtctttaacggctctaccttgaaattcttgatggttgataagtctgtatcagcaaacgatttcgggaaaagggctttgatgaacttggcacggttatccccattgtagtatctcttgtacaggaaacgctcagagatattccatacgaagtgacggagtggaatgttgttgatgtctttggtaaacggtctttgtatgggcttcggggtataagtgttaagattcatccatttgtccacctcagtacagatgtggttcacggtttcttggtcggcaatgcgaggcaggtaataatggcaatactccatgaccatgcggatgcgctcttccttttcccgttgctctctgcttgcgtaattggcacggttcttttcgtgaagatccggggcgatagtaagctctatcggttgtgtttggataagtgtctcttcttttgtcggggatgattcgggtacaggctcagggactgatgtaggtccaggcacagatgtggcttcttcaagtgtattttgtgacagttcttcctgcacctctatggcttcggcaatcgtttctttcttgccgaacttgattttgtagatttcgtatgtatcaaagataagtgtctgaaaggagagatagagcaaccatcccaacaggttacagcatacgaatactatccacctgacaaagttgtcttggttgaagctgtccgctattaccagcgtggcaatggaagatattaggacgatggcgaagccgacaaagcccaagatgatgtatttgtccttgattgatgattccatatttcgttgagagattgaatgttcctgtattattttgtgcaaagttaatgctatttttcccaattactgcccgttatttgcggttagaacggtctttttcaatgtatttcacgaaatgtcatcatatcatactctgtttcatactctgaggggcttataaatggtggcatcaagccaaaaacatagaggggcgattatagccttgtagccataaccgcccctctgaatacctgtcaatgtgagacatttatgcctccttgcgcttcaaggttatcttgtccaccacctgacacatctgctgcgctgctatcttggaatagatttgtgtggtggtaatgttcttatgtccgagataggcttggatgacagccatgtccgttcccatttccacgtgcaggcttccgaagctgtggcgggtacagtgaaaggtgattttcttggttatccctgctgccgtgagccaccgttggagtggtccttgcagcatcttgtccttgaaatcctcaaagataagtccctcgccccgttctcccagcagtccataggcttcatcactgatggggttatgcactatttctttggttttctgcatacgggtggtaacgaacatcctgccgttggtgtatggttgtatctgctgccacgtgagctgtctgatgtcgctctttctcagtcccgtaagacaggcgaaaagaaaagcttttttcaagacctcctcctcacagggtgtttcggcaagccgtatcagttcctcttggctcaaatgctccctgatggtgggaatgcactcgatgcggtctaagaagccgtttgggttctcctttatcttcctgtcacggtaagcggtgtgcagcacggcacggaaagttgaccaatagcctgctgcggagttgatgtgcagcttttggttggtgtggatggattggggtgcatcaagcaggtattccatgaacttgcggcacaaatccacatccacctcctcaaaggtgcatttgccgttcacgaaccgctggaaatgcttgtatacgtgctgccacttgatattcttgcggtcagccagtcctttgaaataggcaaggaaatcgcccttcatcttggtcttgtcaaaaaagccgttgttttcattgaaaatggcttcgtagcgctggttgcgcaggatgaccgctttcttcatcatgcgtgcgttgaagtcccgttcctgctggtttgcaggtttggcgaagatgtaaattcctaaggcttcacgtgtaatcactctcatggtgacattgtcacggtagccgggatagtagtcaaggcatagtgaatactgtgtcccgttcttaatcttgcgcttacgcaaggtaactgttttgcatttactcataataattatgttttaattggttgtatacattttggagttgtatccatgtttccgatggcaaaggaacaacgtgaaatatccgtgaatacctccacgatacatcattttgaaataattttcgataatcccgatttttcacggttatttgttcctttcagccatgacacgctccacatctgagcgcaaaagcaggtttttcacacccacctttatcttttcgatgtgcttcaccttgacgatatggcagatgttggctgacgaaagaccatagatttgctgcacctgctcaacggtatagtagcgttcatcgttcacaaggtcagttctgcggagttcgttcaaatgtgatttggagtaataggtacgcccgtactctcttttagtgggtatcttatggcgataggtgtaggcacggagtgcggtcggcttcatgccgaacagttcctccacctcctcggtcagtagccagtcggtaatttcgctaatatcaactgccacaccgaaaaactcgtcaatatgcttcttgctgtaatagttctttcctgcgatacggcagatggggatatggttacgcttggcggaagtgtaaagccatgactgctttaccttaaaaagggacatcacctcctcgcccgaatagaagtccaacacttcttcgctttccttttcccttttttctcttttggcaggtaaggaagatgaagatgatttccttggtgtggaggtgttgccgggcaggatgcggtgatagggattgccctccaacatctgctcgatgtcggctctgcggatgaatgccatgcggttgctgatgcgtgaggctttcagcttgccgatggctacaagtttgtaaatgtactgtcgggaacagcccatgaggatggctgctttggaaaaggtgagatactcctgatgctgtatctccatcaagggttgggcgactttgaagaggttgttcttctgcatcactctggctcgtttggcttctgcctgacaagcctcactgcaatatctttgcataccgcttcgggttacaaaggacttgccgcaaaaactgcattttctggttgctttcataccgttttatcgtttaatggttcatttcttcaatcctatatctctgaaatggtaaacggatgtgaacggaagtcaaccattgtcgcttttctacacagtgtgactgtttccgcatatcggggcggttattgtcgcttgtcgtaaacggttgtaaacccttgtcaactgtctgcacggtgtgacaaaaaacaagccccgcaaattctccacgtcagaaatacgtctcaaaaatatgtggaaatttgggaagcgacaaatggcaaccgaaaagtgttaaattttagaatatgctggtaattaaagatttacactcggatatttctgattagttttggttgttctatggttataaatactaagggtaaacatattgggagcaaggcgtctgattccatcgttcaaagtaacgttagttagttttgtacattcccaaaaagtaaaaccaaaggagctagaacttccgttatagttgttgtcattgttgaaatgttcatctctgagattatacaaagtcagtttctttgcagttcctaagcttgaaggaattgatactgtagccaattcctgacacttattaaatgtataagaccccatagcctctacaccttcaggaatactgattgaggttagtttgatgcaatagctgaatgctttaggacctatccataacaacgtagacggaagttctatttcttgcaggttgacgcaacgagcaaatgaagaacagccgggatactgggtatcatcatcactgctagcatcgctttttttagggtcaccacttacttgtgtcttttcctcattccacggattatccttactccatgtaccaatagaccatactgtctttggcaacactacttttgtcagtgccgtcatcccatagaacatataatctccgattacatcattctgtgtatagttagctgttgagcctgtgccacgatagctcgtcactttatcttctacaatattagcctccttcaggttcagtattttcagtgtacctgccagtgcgcgtattgttagtatatccgctccgttcagcgggccattgataatcagttcgtttattttagcccggtctgcttcgcttgccgggagtttgctggaaagcgttccagcttgtgtcaaagtcacgcttgtctgtgcattgatgctcaagatgcttaccagcaccatgcatacacttacatagaaatgtttcagcttcatagtcgtatattttttattattatttttcattggaagtttatttattactgcgggtgtctgttcccggtgtcgggttatcaccctctccaggattaggcttatccgcatcttcggtggtgaaagtagtgtatcctccatagctgatgcccttggcattgatggcgtatgcacgcacacgatagcgggtcttgcctgtcagaccggtcagtttgtggcgcatggacatacttccggaagtaacagtaatcttctttccgttttcggtagtgagttctgttccgtcatccaccatccaaaggaaccctttctcggtaatggtcagtttgccatcgctttcaatgttggcgctaagccaagctgttgttgcatatacttccgagacgtttatatagcctaccgaaggtttcttggttccgtcatcatctcccggagcgggattatcatcttcacccggaggcaacttggctgtattgaagttgttatgaccgacggtagtttctccgttcttattggtcacatacccatatacataatatccgctgttttccgtcaatccggtaattgtccctgttaccgtatttcctgtaagggtgcccggtgcattggtatattcgctttcaccggattttctccatttgaaaccttgtgccgtcaactctgcacctccggtattagtgacctcaaaggagaaactaaggctgtgcgcctcactcttagtacatattaactctcccagtgtagctctactgctgctgcccgtctcgaaggagagtgcctggctgtatcctgttcccacattattagtagcgtacgcacgtatattatataaggtattatagcttaatcccgtcagttgtgcagtgaaagcctctttagtgtcttttgatacaaacttcagcgagtaaccgtcgtctacacttggattgctgccggtagaaaccacgaatccacgttctttaatcgtttctccgtcaccgcctaagttggcaatgttggcactggcctgcgcattatcatctttgatattaatcacattcagaccattcagtgtaggttccgtatgttttgttgtggtaaactgctctacggtgctataccctgtgcctttggcgttagtagcaaatgcgcggacgtagtaggtgacaccaccctgcaagtcgccaaggttgacgagaatattattgtcagcttccgtagatatcgctttggtgtcctccaaagtcggtttggaatttgtgctgctgtagcagacccctttttccgttacttccagtccgccattagtcgaaatggtagctttcactttggcaccattctccgtcaggtcgtatactctgggttgtgccacggtaggtgcgaatgtagtttctgtattgaactgaatgtcaccgctgtagaacgtaccgtcacgggtgatggcgtaggcgcgggcatgataagtatctccttccgtcagtccggtgatagtggctgttactttctgctcggtgctgctgtccgtaactttactcccttctacggtaggattgggatctttgctgtagcaaatacccttctccttgataacgctttccgtttcgtaggccatcagtgaagtgatggtggcggtagaagaagtcagggcggtgacggtggcttgtgtcagcgatactacctgctctttatcagtggtgaattctacggtcgagctgtagcctatgcctttttcattcttggcatatgcacgcatgtaatatttggtactggctgtcagccctgtcagcgtagcagagaaacgttgcgctccatccatggcctgcacgctctggctgctttcgatggtgggctgccggctttcggtgctatagcaaaaaccgtattcttccactgtgaaaccgtgatcctgagttacggcacccaggcaaactgcctcgtaagcaaccgcttctactggtttattggcaaggctgccggttccattcgctatgaccatcggaatcttttgttgagtggtggtgaactttaccgattcaccgtagcctgttcctgcatcattggtggcgtagggacgtacaatataagtggtgttcgccgccagatctgtcagttctactgtgaagtcatcaccgaatggcagcttgatgttgtcgtcgagggtaggttcggcggcattttcaatataaatggcataagcgaagcctcgtactgtaggctcgtagccgccattatccgtaatggtggcggtgagggtggcgctgtactcggtaacgttagtggcctcggcgatgcttagtgaaggcggaatagcgtcttcggtactgaaactgctgctctttcccttgatgacggacttaccgctacgggcaaagatgcagtaataatacttctctccgggcttcagtccttgaaccgcggcagtatagttgttgccgtctcccggggtagcgttgacttcttgtgcgttgctcaagctggctgatgtggaataaaggaagcctattttcagttctccggtactaccgggatgcttcaccaccgttccttggaaagtagctccaaaacggcttaagcctgtaacactgttagtagtcagtgtcggtgaatagactgaaggttctttgtcctcttcacaacccatcatgaacggtaacaagaacaatagcatacatacatgtctaacgacgtgcgcatgcctaaatgcgtattgttgacccataaattaagtgtgtaaaatgttgtttaatgttcttcgttacaaatatatgtattattttgtccaataaacctttttagagtccaatattttaaaagatgcaggtaaattattttgtttgtaacggaaaaccgtgacaagtattggagtgtctgactattttattgctttcttgcagtgaaatgaagattggagggataattgggggcttttaataagttgagcatttgcgaaatgtgactgaatactctatctgtcggatctatagataggacatataggatctatatacgggacgtgtagcatctatatatgggacgcgcagcatctatatatcctgcatgtccgatatatatatcctgtgcgtccgctgtttaatgggttggttagaagtgactcaaatctatcaatccgaagtccgggtccttttccggttgccacgtacgtacgtggatcactggttccttgggattgttcaggtctaccatcaggaacagataccccgtatcgccgtagctggacgagaaataatcctgcttgatctgaataccgtaaatttcacctcctacacccgacttgcgaacttggttgtcggcaaagcggaggttgatgaattccgagctacggaaaatgtgctgtaatttcttcatgtattccgactttgtctgacgggtgtattttacagcttgtttgctcatggcctgtccttcgttgctggcagtgtgtttcagtactgaaccggtgataatcagggcatcatcagagaaaatactgttgatgtaatcgtagcgcttcaaagcataagccgtcttataactttcaaggaagttgataagtacgttgcgtacggtatcattccaggatgtctggttcatgatatcgtctacggcaggtttgttgaggccgaaagagaggcaatctatcttaccttctttgttcagggtgaacactacatcttctacaaacgtgcgttggttactgaacttgaaactcatgggaagactgcggcaagttacttccccattgcactctaagaatctgaattccggttcgttgatgatcttgccctgtccgtatttgatgaggcggttgaatatttcgtatccgctttcggtacataaggattgtatatcagtgaaatttcgtgtacgaatagccttttccactttcttcatagtgtcgtcgtaggcagcggattccatggtggacagataatgcatgccgctgtttgtggtggtggcactgtctgattctgccattaaggcttcttcggtcttttcttcaccgggtttcggctcttccccttccagtttcagggcgcagttgcgcatggctatggggttgacggttcccatcacttctgacagttcgttgtcgatatttgcttcaccttcaaacatatactcggtgcggagttgcagattgcgggcattggcaagcacaggaagttccacgatacctgtaccgtctttggctgagaagatattggaccagtcgcgaccgtcgaaatacgtgtaatcgtagttgcgggcgggctgtcctttgtagagcactttgagattgatcgtcttcagatcaccgtccagatgggtgctctccatgcttattttcagattggagaagatctcgttcatctgtttgggaatccaagtggtgagtaagaggtctttgccgtcctcatccttcatggtgaggaagttgccgtcggggtagctctggagcaggacgagcgcccagtagtaataacgcagggcatcggccacctgggctttcttttcggcacggacggcttcctgggcaaagtccagtatctttgtcttccgtccgtcgaagatacgttgtatttcggctactttgatatagcgcatgacgacggcttccggttcgttttgtatcacgatgcggcgggtattgttcagtgtggcacgcgagtaggtgttgatgacggacttgaatgtctcgtccacagttgcctggtcatccttcattccgccttcggtcagttgctcgaacttggaggatacgtttgtggagatctggctgatgagtgctgccagtgcttcattatcggctttcttcagggtagcggcgtttcccgtaccccagatgtagtctttgctggtttgtatttcctcaatggattgtccttttgcggcaagggcaataaataagaatgtaacgatgataaatgcgctccttttcatgttgttgcttttcatgttgtttcaattctttgcaaaagtagaaacttttttctataaagcggcatttcagtaagttattttttatgcctgtcaaaggatgcttgtaattgtattctctaattacatccaacccatacccgatccatacccgaaccgtatctgagccgtacctgctccgtaccttcttcggtcagaggtacctttatacggagaaactacggagcagatacggcccggatacggcctgggtaggtttagagggtgtttaggagttatgcgggtgaatgaagtatgggggtgatatcgtcgaatatacggaacaattcctctttggtctccgccctcagcatggcaatacgcgactcccggaagttcggtattcctttaaatagcgggcttgctgccaaatggcgacgtacatgcagaatacctcttctttcatccagcagattgacgctgtccactacctcctggcgcagcacactcagtttccaatcggcactcagcggtggcaactcttcacccgtttccagataatgcctcacttccttgaatatccacgggcggccaaagctggcacggcctatcatgatggcatccactccataaagatcgaaacattcctttgccctttggggactggtgatatcaccgttgccaatgatgggaatatgcatacgcggatttttctttacttcaccgataagtgtccagtcagcctcaccggtatacatttgtgcacgggtacggccgtgtatggtgagtgcggcaatgccacaatcctgtaattgctctgccagttccacgataatcttgttgttcgcatcccagcccaggcgggtttttacggtaaccggtatctttacggcatctaccacggcacgggtaatctccagcatcttgggaatattctgcaacatacctgcgccggctcccttgcccgctacgcgcttcacggggcagccgaagttaatatcgagaatatccggacgcgcctcctctacgatgcgggcggcttccaccatggtttcggtatctttgccgtatatctgtatggctaccggccgttcctcatcactgatattcagcttctgttcggtcttgctgacggagcgtatcagggcatcggcagatacgaattccgtgtacaccatgtcggcaccgaacttcttgcacatcaaccggaatgcagggtcggtgacgtcttccatcggagctaaaaatatggggcgttcgcccaagtctatgtggcctatcttcatgaatcgattgaactaaatgattatttcgctgcaaaaatacggaaaaaagcctacctttgtatcattcatttatttaactaatatggaattatgaaaaaaggtttggttttagttgtgatgtgtgtagcaatgttgtttgctgccgcaccttcggcttcggcacaagcaccgagtgatgaatacaaggctacattggaaaaaatgctggaactatccggttctatggcgtcggcaaaggctatggtgccacagatgatttctatgttgaaacaacaatcatcggcatcggcttctttttgggatggctttcagaagaaatgggaaggaaagtttggcagtaagctggcggaactttacgctcccgtttatcagaaatatctgacactggatgatttgaagaaaattgttgctttctatgaatcgcctgtaggaaagaaactgggcgcttctactcctgccatgatggctgagggcatgcaaataggacaaaagttgggcatggagattgccactgaacttcaacaggaattgcaggcacagggaaaatagttacaagttacgagctacaagctacaaggggctacgctatattccgaaaggtactcgtagcttgtaacttgtagcttattaaatatatgattttatggatttaaaggactttgaaatcatggcccctgtcggctcgcgcgaatcacttgcggcggccatccaggcaggcgccgattccatctatttcggtattgaaaacctgaatatgcgggcccgttcggctaataccttcactattgaagatcttcgggaaatagcgcagacgtgtgatgagcacggtatgaagagttatcttaccgttaacactattatttatgatcaggacctggcattgatgcgcaccatcgtagatgcggccaagtcggcgggtatctctgcggtgattgcggcggacgtagctgtgatgagctatgcgcggcagatcggtcaggaggtacatctcagtacgcaactgaatatctcgaatgtggaggccctgcgcttctacgcacaatttgccgatgttgtggtgctggcacgcgagttgaatctggaacaggtagcggagatttatcgtcatatctgtgaggagaatatctgtggtcccggcggaaagcctattcgtatcgaaatgttctgtcacggtgctctctgcatggcagtgtcgggaaaatgctatctttctctgcacgagatgaaccactctgccaaccggggtgcctgcatgcaggtgtgccgtcgctcttacacggtgcgtgataaggagacggatgtggaactggatgtggacaaccaatatatcatgtctcccaaagacttgaaaaccatccattttatgaataaaatgctggatgcaggtgtacgcgtgttcaagatagaaggacgtgcccgtggcccggagtatgtacgcacagtggcggaatgttacaaagaagccatccgttcttacctggacggtacctttaccgatgaaaagatagccgcgtgggatgaacgtctgaagactgtattcaaccgtggcttctgggatgggtattatctcggacaacgcctcggcgagtggacgaagaactacggatcggccgctacggaacggaagatatatgtaggtaagggtatcagatacttttctaatatcggtgttgccgagttcctggtagaagctgccgaactgaatgtgggagacaagttgctgattacaggtcccactacaggagcggtattcactacgctcgatgaagcccgtgtagacctgaaaccggtgcaaaccgtgaagaaaggacagcatttctcgatgaaagcggacaaaatacgtcccagtgacaaactctataagctggtttctacagaagaactgaagaagttcaagggactggatattgagaaaacacgtggatgatatacttttgatacagttatattgaatatggaaaagtatatctatgagttagagatgaaggtgcgcgattacgagtgtgatctgcaaggcattgtgaataatgcaaattaccagcactatctggagcatacccgtcatgagtttctgctatctaccggtgtcagttttgcgggattgcacgaacagggagtcgaccccgtagtggcacgtatcaacatggcgtttaaaactcctctgaagagcggtgatgagtttatttccaaactctatatgaagaaagaaggcatcaagtatgttttctatcaggatatttttcggaagagtgatgataaagtagtcataaaagcaacagtcgaaacggtgtgtctggtaaatggacgactgagtgacagtaagctttttgatgagatatttgaggcatacctctaatgttttcaccacagattacacagattaacacagatcaagaagaataatctgtgttaatctgtgtaatctgtggtgaattgaatttgtacaaccatgaacaacgacgaacgaatttgcagtatagccctcacgctttgccccggtataggacatatcggggcaaagcgtttaatagacggtataggaagtgccgcgggagtcttttctcaacgtaaagaactgcctgaattgctacccggtgtgagccctactatagtcactgccctcgataatcctgccgcttttctgcgtgccgaacacgaaatggagttcgtggagaagaatcgcctcacttgtctgactctcaaagatgaagcttatccgtctcgtttgcgcgaatgtgaagatgctccggtagtcctcttcttcaaagggcataccgatttcaatcgccttcgcgtcatcaatatggtcggtactcgcaatgccacagagtatggcaagcaattctgtgtagattttctgcgtgatctttcctctcattatcctgatgtgctggtagtcagcggtctggcttatggcattgatatccatgcccatcgcgctgccctggccaacaacctttccaccgtggctgttcttgctcacggactggaccgtatctatccttatgttcaccgtaaaactgccgttgatatgctggataacggtggactccttaccgaattcctcaccgaaaccactcccgaccggcataactttgtcagtcgtaaccgtattgtggcaggtatgactgacgcaaccatcgttgtggagtctgcctctaaaggtggttcgctgattacggcagaccttgctgtagactatcatcgtgattgtttcgctgttcccggtcgtacaactgattctttgtctatgggctgtaaccagttgatacgtgataataaagcagctctcattcagtctgccgatgactttatgctggcgatgggttggactacggaagagggacccgccaaacatgaaggcattcaacgcagtctctttcttgaattgacggaggaagaagaacttgtggtcggcatccttacacgtctgggcgacttgcatatcaacgtattggtagtggaatccgatattccggtgaatcgtatgacagctctgctttttgaactggaaatgaagggcgtggtgcgggcattggtgggtggggtctatcatttattaacataagccatcccttggaatgatattttttcatatctttgttcccacaaccagtcataatgctatgaagtacctgtccttttttatacttctgtttattggagaactgtccgtaagcgcacagcacatgttctccagacaatttccattcttcaaccaactctcttccaatgagattttcagtattcatcaggatagagaaggatacttctggataggtaccacaaatggtctggcacgctatgacggctatcagttaaatacattccgtacagactataaaaatcagaatctgctgactgacaatggaattactgctattaatgacaatgatctgtatgtatggatcggtacgtggaaagggctgaacctgtataataagcagacctgtcggattactcctttctcagatgcacggctcctggataaggtggtggatgctataacagtcgacaaggatgggaatgtttgggtaagcgccggtggaatgatataccgatgcgattctaccgcgcatattataaaggagtatgaagttggaaatattcaggagggatatgctattagcaatatctatgtagatcagcaaaagcaactttgggcagtgggatcacggggtatattcaggtatgagcccgaaaccgattcttttttccgttatccgccactgggtaacggacataccgcatatattatgcatcaagatagttccggtaactactggatcggtacatggggggaaggtttgtggcaattctttcccaatgcacagaaaggaggacactataagaaacataatatagctgcttcgaacaataaagaaaccggtgttgaatccattcttttcagtatagagcaggatggtacgtttggctatctctggatgctttcgtatgccgggctccatgcgtttaaatacacggatgcgggaatactggaaaaggtggatataaatcatctggttgatacgcacatgatgtatacccggatatgtaaggacagggagggcaatctgtggttgccttcgtatgatatggcgtacactatcttttttgataattcgaacattgacaattatcttcttccgcaattgaaggaagagatgggatgggatgccaatgtcttgaacctttgccagggaagcgacagcaccatgtggttcaggcaggacaggtatgaattgtgtatgtacgatttctcacgggatatgtttgccggtacaggcataggtgaggttaataccattatcagatctcttcataaacccggtgtctgggtcaacctgagtcagactccgcatgtgatgaggctgacgcaacggaacatgaaggtgagggtagaagaagacattaatataggcggagttacaggattggttgaggataaggatggtaatctgtggatatccaagtggacggatataaatgtgaaacgtcctgataaagatgacttggtagtttcgggtagtgacgttccggtaatgacttctctgttcaatgatgtaaagggagaagttttagggttgtctcacgagagcaaaatctatcggctgagttgtgctgacgggcggattacctgtgaactgaaagacagtatttcttctcttctggaaaaggaagaagtgaacagtgtctgcattgaccggaaaggacggttgtggctgaacactactttgggaagaatattgcggtctgacgaaacgatgcataagtttgaaaatgtatcactggataatgagatagatgattgtacggtattaggattactttccgataagaacagtgtgtggattatcaccaataagaaagtacttcaatataatattgattcgcagacttttcagcactattctactgctgatgataacattatggtagatgttttcaggtataaggctatcagcctggatggttggggcggactatatgtaggcggacatcgcggattcatacatattcgtcccggtaatgcatcggcggtgaactgggctcccacgagcttgcatatcacagatgtcaaagttgaagacaaaagtatcttcttcggcaatgcggaagcctcgggagagaatacgatacataagattttccttggtccggatgaccggaatattgagattttcttttcttcgcttttgtattcgctgaatgcgggatgtcgcatagcgtatcagttggagggggtggatcattattggatctattcggataacaacagaaattccgccttctataaccacctgccgaagggaacgtataaactccgtttgaagttggaatatgagcggggtaagtggactgaaggcgaagtattgctgaccattgtgaaagagcctgccttctatgaaacctggtttgcatatcttgtttatgtcattctcatcggattgtgcttctatgtggtaattcggctttatatgcgtcgcattaaactgaagagtgaagtgagattgcaggaagaactgacgcgtaccaagctgacttacttcaccaatgtttcccatgagttgctgaccccgcttaccgtcatatcctgcatatcggactatctggatcagaaggttcctgccgtgcggcaacagtccgtcatgctcaaggctaatgcggagaagttgaagcgactgatacagcaagtgcttgatttccgcaagatggatgtggggaaactgaaactgaacgtttcggaaggagatatccgtgagtttgtcctgaacatctgccaggtaaacttccaaccgcttgcattgaagaagaacatcacgctggatactcgttttgaagcggaggaagcacatggttatgtggattttgataagctggataagatattgcataatttgctgtccaatgccatgaagtatactcctgagaacaggcgtattactgttgatgtacgagtagtgaatgaagcggaacatcggatattggtgttgaaagtggaagatgagggcgttggtatctctgagaaagaactggaacagatattcatccgtttctataacagtaagaagaaccggggaatcgagtcgaacggaatcggtctctcgctaacgaaagatttgataaccttgcatcatggccttatcaccgtggaaagcgttttaggacaaggctcctgtttcactgtaaagctgcctgttgacaaagaaagctactctccggatgaattgcttgacgagacgatggtgttgcagaccggtacggatgatgtgcccatggaagactatgcctcgtctgatgaggtggataaaccggctatcttgttgattgacgacaatacggaattgctgttcgttatgaaagagatgttcagggaacgatatactgtactgacagccgcagacgggcaacaggcctgggataagttgaagaataatgaggtggatgtcgtcatttgtgatgtcatgttgcccgatgccaatggttgggaactttgtgcgcgtatgaagggtgatttgcgtttcaatcatatacctgtcatcatacttacggctaagaatggtattgaggaccgtgttgccagctatgaagcgggcgccgacggatatatagccaagccttttgagttgaagatactttttgcccgggtggataaccttatccgatcttcgaagatgcgtcaggcggctttccgtaaggaggagaacctggatctggaaagtctggcctatccctcggcggataagcagttcctgcaatccattatagatagcatcgaacagcatttggaagagtctgaattcgacttggaacaattggctgcggagaagaatatgtctaagtctaccctttaccgtaagataaaatcgatgacgggaatgacccctttggactttatacggaatattaagatgaagcgtgcctgtatgatgttgttcaaccgctcgcatactatatccgaggtggcgtatgctgtaggattcaacagtcccaaatatttcactcggtgcttcaaggatgaattcggtgtgacgccgagtgaatatcttcagaaaaacaccccttaatttttagtatatagatgctacatacaggggtaaaatcctgttatcaaggggtaaattcgggtcatgacagaatctctccccttctataaatgatttctgtacctcctttttcataagatatgagttgatttgttgtcagatacccaaacttaaatcaaagcatagttatgaagaacctcagtatccgtcatggaaaatcatccggaaacaaatcagtactattacttactgtattagcattaggcaccggattctcttctttgtctgcccagacaaatgccgcaagtgaccagataacggcacaaccagctgctgaccgcattgtacctttccgccttagtgaacaaggagtagtccgccctgtggaatggggattggatacggcttgggaagatgagggaaatatccgccgtggccagggatttatggaaacggtagatatagtgcgcgtttcttttcgccccaccgatcccattgtggatggagatttgggagctgatcagaaagaacatatacaaacacgacttggtttactggactttgtctctcctaaacccaagttagctataaatagcgatcaccccaagattgacgattcttataaaggtaacgcccgggcttgggctcagatgatggatttgcatactcgttattttcaggatgcaggatacgaggtgatttcagtggctccattcaatgaaccggattactcctatacaggacaaggtacccgggaggatttctacaaaattgctgtggagttgagagcgaatccccgtttcaagaatattcggatttgtgggggaaatactctgaattgtgatgaagcactgccttggtataattatctcaaagaacaacttgatgagggaaatacccatcagcttgccggtgaattcaatggttacgctgctttctacgagacggttcgcaaggatggaaaaatggccatgaatgatgagatgcacaacgtgatggaggcgatggtgggtctggagtatgggttgcagaccggtatctggtggggaagtgcagagtatgcccgtggtgaattttgcaagattagccggggtggagaacgactggcatatactgaacatcgtcctaattggacggcagcttctgtctatcggtctaaagatggcagtaaggttcaggcttttggaggcgtttcggaacgtcaggctaaaacgacaacttatcgttttgtatccaaagagaaggatgtgttctatgatggttatggtccgcagcgtgagttctacttggagatgcccggaggaaattcttatcaggacgatgaacagcggaatgccgaacgggtggtcaatattacttggggagaagatattcagccggtgatagacggacagtatgtgctgataaaccggagtactcagcgggcagttgaaataacccagggcaacacggcggagggcaccaacgtgaagaccggaaagtttgacgcttccaaggcttatcagcgttggtatgtccgtccggtttccagccgtatcggtggagatttcagctatttctgtattacgtctcccataaatgggatgtcattcgacatctggaattggtcgttggaggacggcgggaatatcgccatctatggtgccagtaatggcagcaatcagcaatgggcattggaatatgccggggatggatggttttatatccgcagtcgccatagtgccttgtatttggaagagggagaggaagctttcaatgtgcagcaaggtacgaaaaagggaagtaatgatgaacggctgcaatggcgtctgatacctgctccggcttctaaaattgaaattaaatctttagctactccaaccggactgacgacggaagggcaatctgcatccgttttgttgaagtggaacaagcaatccgatgctacagaatacactgtgctacgttccgaaacatccggtggagcttacgagattattgcgcgtaatgtaaaagaaaccagttttgtcgatcataaggccttagcgggtaagagttattattatacggtgaaagccaatgataattgtctgaacagttcgccgaagtcacaagaagtaactgccactattactgatgtgcatgccctagtagcacattatacttttgatggagatttactggacgagacggaaaatttgaatcatggtgcatccttgaaaaaagcaatgtttaccgatggaaaaataaacaaagctgtacaacttaacggctcaacggaatttctgcaattacctacggatattgccaatcatcagaatctgactgtttctacttgggtgaagtgggatggtggtgcagactggcaacgtgtcttcgactttggtagtggtgaagatcaatatatgttccttacttatagttccaatatacagtcactccgctttgcaatgaaaaacggagcggaagaacaggccctggaaaccgccttaccctctcccatacgcattgacaattgggtacatctggcattgactatcggagatgcggaggtacggatttatgtgaatggagaactggctgtttcatccggggatattactatccgtccgatggatatccgtccctgtctgaactatatcggtcgtagtcagtttgtagctgatccgatgtttaaaggaagtatcgatgatttcagagtttataattatgagttatcagcagaggatataaagaaagtagcccaggggggatcggtaggtatcattactccgcagatttccgatgatgaattgtttatcggccctttacctgccgatcagaaactacaggttacttatacacctgcccattcatcgggtagagtatctctcagtatttataatatgcagggagttccggtactttctcatgagacggctggttccggtgttactacgctggatgtatccggactccctaccggtctatatctgttgaggcttgttgataacaaccggtcagttacacgtaagtttgcagtgaggcattaataagtagggtataaaatcctttcatcagggtataaaaacgtttcatgaaaggattttgccccttcgataacctgtttttgtgcctatcttctaattaaatatcacttgctttgcccttggataattaaacttagatcatattagtattatgagaacagtaagcaaattacttctttcttgtgtgatgttattcacattattgccggacgctgtgcttcatgcatccgaccggaagactctttttgacagtaactggaaatttcatttaggcatcgtagccaatgccgaacaaccggaatataatgatagtcattggagagttcttgatcttccccatgactggagcgttgaaccattgtcttttcaaaaacaaggcattactaccggtcctttctctcgcatgagcgaaggtgacatcgatacgggacagaccgttggtggtgaaggttggtacagaaaagaactcactcttgcaggaagcgatgccgataaacgtattgttctctattttgaaggagtatacaatcagtccgagctatggatcaatggtaagaaagctaattataatgtttatggatatacctcttatcgtgtagacatcactccttatctgaatgctcccggtactccgaacgtgattgccatgaaagtggtgaacgccggacgtaacagtcgctggtatgccggttcgggtatcttccgccatgtatggctgatcaaaacaaataaactctatctggataaatgggatactttcgtcaacgcttccgaacttcagaagaaggaagctgtgattcagttctctactattgtacataacgagggcctgcacaatcaatcaggtaaaataggtattaaaatatattcgcctgctggaaacgaagtgttttctacttcacaggacgtgatactctctgaaggaacgccggtggcaacatctttctctcttaaaaagcccgagttatggtcagtagatacccctgtgctttatacagcggaagtatccctttcctcagacggaaaggagtatgataagatatctgttccttttggtatccgcaccctttctttttctgctgagaaaggctttctgctgaatggtaagtcgatgaagctgaaagggggttgcgtacatcacgataacggacttttgggagccgccgccatcgaccgtgccgaagaacggaaagtggaactgatgaaagctaacggctacaatgccgtcagatgtgcccacaatcaagtgtccgagcatttccttgatgcttgcgacagattgggtatgctggtgattcatgaaaccttcgaccaatggcagaaagctaaacgcgagcaggactatcatcagttctttgatgaatggagcgactgggatttggctgcgtctgtccgccgtgaccggaatcatccctctatcattatgtggagtatcggtaacgaggtggagcaacgtgctgatgaacctgagggagacttgatttccaaaagactggtgaataccatccgcaagtatgatacatcccgtttcacaaccatcggttccaatgacttctgggacagacgccagtttagttgggacaaagattcctaccggattttcaggaatttggatgtagcaggctacaattatatctggtggaaatatgagagcgatcatgctgcctatcccgatcgcgtgatctatggtagtgagtcttatccgaaagaagctgcccagaactggaacttggtagaaaagcatccttatgtaataggtgatttcgtgtggaccgctattgactatctgggtgaggctggattagctcatgccttatatctgaaagagggcgagcatgatacgcagtttatgggttggccttggtataatggttggtgcggtgatattgacctttgtggcgacaagaagcctcaatcttattatcgtgatgtgttgtggcgcgagcgtcccattactatggcagtccatgcccctgttcccgaaggcaagaaagaagtggtgaacggttggggctggcccaatgagttggtgagttggaattggacgggttgcgaaggaaaagtgatgaaagtaaacgtatacagccgttctccgaaagtgaaactctatctgaacgacaagcttatcggagaaaaagaaacgggtaaagagaactatacagctaccttcgatgtgccctatgaaccgggaactttgaaagcggtgaactcaaaaggtaaggaggaattcgtattaaagactgccggagaacctgcggctatccgtttgattgccgaccgcagtaaaataaaggcttgcaagaacgatctttcctacgtcaagattgagctggtggacaaaaatggaaacgtagttcccgaaacttctctgcctgtcaaaatcgaatgtacgggcaaaggaactgtcatagcaggtggaaatgcagcctatgccgatatggaaagtttccgttcacttactcccaatacattccggggaaaggctattgccattgttcagcctgatggagaaaaaggcgacatacaggtgaaagtctctgcaaaagggttggaagatgcttccatagtaataacaacctactaaaaagcgatagtaagataagttttgcgaagaaactggcataaacctgcataagtacttaggtatacattttcttgtatgttatctttgcagggtttatgcgattttttctgccgcagatattattatatataggtgctataaaacaagataaatatcagaaaagataataaaagaagctaacttaattttttaactttaatctagtaagatgatgaaatcagtattagtaagaaacaatcggagagtccttgccggcctgctcgtttgcactggttttatttgcaattatccctcttctgcctttgcggaatcggataattcttcagtgcaaataacgactcaaagtacaacaccgcagaaacgtactttggtaggaactgtagttgactcctctaccggagagactttgattggtgtaaatgtgaaagtgcaaggtgaagatggaggtaccattaccgacattgatggtaagttccagatttctgtaaccagcaaaacagagctgatattctcttatatcggctacaaaacacagacactgatggtaggtgacttgggtgtaatgaccgtgaagcttgcatcggacaatgaaatgttggatgaagtagtgattgtaggtcagggtacacagaagaaagtatctgtgacaggtgccattgctacagtgaagggagctacattaaaagcaccttcctcttcattgaccagttcacttgccggaaaacttgccggtgtggtatccatggtgaacagtggtgaacctggttctacttccgaattttatatccgcggtatcaacacgttcggtggtgtggctactccgttgattttgttggatggcatcgaaatttcatctgccgacctgaaccgtatcccggcagaatccatcgaaagcttttctttattgaaagacgcttcggcaactgctatctacggtaaccgcggtgcaaacggtgtaatgctggtaaccaccaagaaggggcaggagaatacgaaagctactatcaatgtttcattggaagcttcttacttccgtccgacaaatgtgccgaaatttgctgatggtgctacctatatgcgggcttacaatgaagcggaacaggccagaagtttgactccgatcgcttctcccaagtatagtgaagaccagattctgaatacggaattgggtactaacccttatgcatatcccgatgtagactggttcgatcagatattccgttcggggaattataaccaacgtgccaatgtgaatgtatcgggtggtggttcgcgtgtaacttactatatgagtctccaggctaaccatgatacaggtctcctcgatgcaccggactacttctataatcccaatattaaccagtggcaatataattttcagaacaacatctcctataaactgaccaataccactaccattgatttgcgcatgatggcacagatcggtaatatgcaaggtcctaactataatataggcaatgacttgtacaagagggttatgcgtaccaatccggtggaattccccgcttattttccacagcaggatggggacgacggtttcattcgctttggcggtgcagagattaaaccgggcgttttgggaaccaatccgtatgaatatatgatgagttctttcaaggaagtaaacttcaataccctgaatacttcattggctttgaatcaggacttgagtgttattaccaaaggattgagcctgaaagcactggtgaattttaaaaactggtcggaaacttcatatacccgtagtatcaagtctaatatatataaggtgaaagatggttcctataatcctgaaaccggcgaatatgattatcagttgttgcagaccggagatcagttcctgagccaatccggcattagtcgtaattcggaccagactttctacttcgatgcccgtctggactggaaacgtagtttcggtgatcacaacctgacagcaatggcaatgtatatgatgcgtgaatatcgtagtgatgtattgccgaaccgtaatcaaggttactccggacgtgtgacttacgattacgccagtaaatatctggttgaattcaactttggctataatggttccgaacgcttggctgccggtcatcgttttgagttcttcccggctgtgtcagcaggttgggtagcaagttctgaaaagttctgggagccgataagcaagtatatcaatcacttcaagatcagaggttcttacggtttggtaggtagtgatgcctttgccagtggagctccacacttcctctatcagaataatattggtattggctcagcacacaacttctggaccggacttcctacgagtgaaatcagcaagaaaggccccggattctatgtattagcggtgcaggatgcaggttgggaacatgtgaagaagttcgatatcggtttcgacatgatgttgtttaaccaactgaatattacatttgactatttccatgacaaacgtgagcgcatcctgatgtcacgtgcttcctggccttctatgttgggatattggggatcaaaaccctggagtaatattggtgaagtagaaaaccaaggtttcgagttaagcctgaactggacgaaacagtttggaaaagacctgacgttagatcttcgcggtaactttacctacaaccagaatgaatataaatatgtggatgaacccagttatccgtatgtttggcaaaccaataccggcaaaccgttgaatactgttaaaggttatattgccgagggattgttcacaagcgaagaagaaattgccaattcgccggaccaatcacaactgggtgccaacatcatgccgggtgatatcaaataccgtgatataaacggtgacggacagattactactgaagaccaggtgatgatttcatcttatgactggcatccccgtatccagtatggcttcggtttgaatattgtctataagaactttgacttaggtgtgttcttcaatggttctgctaaacgtaagactatgattaatagtggaatcgctcccttcctttctggcggtggagatggtgaggaaggtgaaacactggcccggaatctgatgcagtggattgcagatgaccattggtcagtagacaatccgaatccgaatgcggcatatccccgtttgggtttgaccaaagccgatgtaaccaataacattcagcccagtacattctggctgcgcaatggaaacttcctccgcttcaagacgttggaaatcggctatcgcttgccttattgccgtatctatctcagtggcgataatctggcggtattcagccccttcaaattgtgggatcctgaactggcatggaatgcttatccgttgtcacgcacgttcaatctgggcgttcaatttacattctaagaaacaatctaatacattattgaagtatgaaactaacatataaaatatcccgaatggcgcaggtattgatagcttcctgttgcctggtatcatgcaattatctggatgtcattccgcctgcacaggctgattttaaagacaccatgaaagatgaagaagctacattgtctttcttgtatacttgctatggcggtactccgcgttctactccttatcattatcatgcttttgagcagtcagctgatgaaattattcagccttatgcttactcgaactggcagcaacaagtggcgtggggaactatttctccggcatattccaacagttggggaggtgatgatatgaatatctggattcccagttataactggttggggtatgtacaccatttcctgagcctgattgatgacttgcaaccggtgggagttacggcagaagataaggaagagtacaaaggtgaatgttatttcctggaggcttattatcatttccgtgtgcttcaggctttcggtccttgtcctattattcctgagaaagtggacccgaatgttaccagttcagaccttcccggacgctcacacttcgactactgtgtgaattttatcgtgggcaagctggatgatgcagcccgtgcgcttcctgcaacacgtcctaacaatgaattgggtcgtgctacttctactatggctaaggctttgaaagcccgtatattattgtatgccgcttctccgttgtggaacggttcgttccccaatccggaatggaagaataagaattatgagacagacggttatggtaacgaactggtaagttccagctacgaccgcgagaaatggacacgtgcccttactgcttgtcaggaagccttgactgctgccaaggaagccggttatcaactctttgacattgaaacggcaaacaagaaagctgaccgtgacggaatagctcttcctttcatcccgggacgtgaagaagacactgaggaaaaccgtgagtttaaagaacgtgtacgtatgttccaatatatggttactgccaacgaaggcgataataacaaggagctgatttgggcacaacgtattgaactggatgcccagaatggtggagaaggtacggactgtcgtttgccaaacaaagtggtgaagagaagtaatggagtttatgtaggaggttgggcagctatggcaccgacgttgtattctgtacagcatttctatactgagaacggtaagttgccggcacaggaccccaatttctatcctgaggaagaatggtatacccgtttctatgaaggcgctcaaagccctgctctggcaaccaataatctggacggtgaagatgtgaagaatgacattatcaagatgcacgctaagcgtgaagcccgtttctatgcatggattgtatttgacggcactcaatacagctcgaagattaataatggcaatccgttgtggattaacctgaaaaataccaatacaaacggatataacacaagtaatacccgtaactgtgctggaagcggttatctgtcgaagaagttcatcgatcccaacatctattttggcgccgatggtacccgtcagcacacagctccccgtcgtccgttgattcgtatggccgaactttacctgaatctggcagagtgctatgcagcgttggataatgaaggtgaagcccttgccaatctgaatgagattcgtcgtcgtgccggtatttccgaactgactggaagtgatgtaacaggcaacatgactctgactgattgggtgcgcaacgaacggttcgttgaactctttgaagagggacaccgttactatgacctgcgtcgttgggcaattgctcctcagatgttgaaagccggtatgcgctacggtctggatggtcttcgtgtgaatccgagttttgaggaattcaacaaacctaccttggttaaccaaccgttcaagtgggatgacaaactgtatctgatgcccgtttggtcaagaagtgacatggatgagctttacagtaaccctcagttagtacaggcccccggatattaatcaatctctaataacaaagctttatgaaaataagaacaatattgttgatgggcggcctggtgctactgggtgcctgcagcgaatcaaaatatgatttggaccaactggtaccggaagagtaccataaaatactgtatgtgaataatagcggtaagcaggatcttacgttgtatgatacggatgaagataataagtatactctttccgtagttaaatccgggagtgatcccagtctgactgccagtgtcaaagtcagtgtgctgacacaagcggaacttgacgaggaatatagcgaaccggaaggaacgaattataagctgataggtgagaactgttattcgctggatgcaaccacgttggacttttcatctgccgaccggtataaactggtaaatatcttcctgaaacctcagagtgtaaaagcattcatggaaactgatccggaagctgtatgggtattacctttacaggttaccagtgaaacagactccatcaatgccgaaaagaatgaattgttcctgaaactgacaggagtgattacgcctgccattggctttgccaattcggatgtagaagtgaaactgttggattatggttctgtctctacatttacggagaaagtaaaattcggtcttgatacagataataaatgggatttggagtgtaaatttgtagttgataaggaatatattgccgagtacaatgcagacaatggaactaacttcaaggttctgcctgaaggaacttatactgttccggagatggtaacccttcccaatggcactacgaatatggaactggaagtcacgataaatggtgaccaattggtaccgggtgattatatgctgcccgttaagattgcagaagtttctcaatttgagatttctgcggcgaaggtggtatctccgttggctttccgtgtgatgggacataaactggatcgcgcaggctggacggcagaagccaataccgaagaactgacaggtgaaggtgcaagcggtaaagccggatgtgcattggatgataatcttgcgacttactggcactcaacatggcagacaggaaactgggttagcttcccgtttgaaataatcgtagatacaaaaacagaacatactttcacccagtttgctttgatgcaaaggcagaatgaaagctatacggacaccaagtctggtaagttctatgtaagctctgacaaggagaactggacagaagtaggacgattctctatggagaaaatacttgatagacaggtgttcggcgttactccgacgaagggacgttacttcaaggtatccatcgaagagagttatagaggtaccaatgcttctttgtccgaaatatatgcttatgctttggaataagcagattgcaataactgatttgtaacaatagtgaaagagagatagggactcttttccctcgaaagagagaaagacgaactatctcttttttatttagtaaaatagaaaaggatgagatataaagtgttattactggtctttacagtagtatgtgcttcgtgtgcacagcgtgcggacataaattacaggattgttaccggacaacccttgcaggtgatggaacatttcggtgcttcggatgcctggagtatgcatgttttgggaaaatggcccgaagagaaacaaaaacagatagccgactggttattcagtactgaaaatgacgcgaacgggaagcccaaaggtatcggtctttccctgtggcggttcaatctgggtgcagggagtacggagcagggcgacgccagccagattggttctccttggatgcgtaccgaatgtttcttgcagccggacgggagttataactgggataaacaggaaggtcaacgtaacttccttcggttggcgaaggaacgcggagtcaataaattcctcgctttcctgaattcccctcccgtttatttcactcaaaacggacttgccactaataccggacgcgatggtacactgaatctgaaggatgaacactatgaagactttgcccgcttcctggcaaacgtgataaagggagttgaaaagaaagatggcatcaagttcgattatctttctcccttcaatgaaccggatggacactggaactggatcggtcccaagcaggaaggtactccggctacaaagaaagagatagcccgggccgtacgtcttatcagtaaagagttcgtaaaggaaggtatccatacgggaatcaccatttgtgaagcatcagattaccgctgtatgttcgctacccatatgactgaccatgaacgcggatatgagatacaatctttcttctgccccgatagtgtggatacttatctgggcgataccccgaatgtgctccctcttatttcaggacatagctactggactactaccccgctgaacatgttgcgtgattatcgcctccgcttgcggaatacgttggatacatacggtgtggacttctggcagtccgaaacctgcattatgggtaatgacgaggaaatcggcggtggacatggatttgaccgaaccatgaagaccgcactttatgtggcgcgtatcattcaccacgacattgtttatgcaggcgctcgcagctggcaatggtggcgtgccattggcggtgattacaaagacggactgatccgtgagtatacagaccccgatttacaagacggtagggtggaagactccaagctgatgtggatattggggaactacagccgcttcatacgtccgggtgctgtacgtatgtctgttgaaactactgataaagaaggtaaagctatccgggatggcgataccgatcagcagggattgatgtgttctgcctatcggaataccaacggacagtgggcgatggtcgtcatcaactatgccgaccgggaacagaagttcactgtcgatgtaaacgatccgaaggtgaagtcatggcaaggttatcgtacgtcggatgtagccggagaagaccttttgcctgttggaaagttgaagaataaaaaggtagcggtgatccctgcccgttcggtgacaacatttgtttccggaaactgatgcgtaataaaactttagttatcagtcccgaaattagctgagaattgcgattatgaactgaaatgtccacctatttgatacttttatataccctgttcttggaagatatagtttatttttgcatgtggaacattatatatatctaataccgataaataaacaggcttatgaaaaagatttttttacccttcgccgcagttgcccttttgttgagttcctgcaaggacgctgcgccgaaggaagaacttgtaatcaacctacaagagaaaggtgctgaagtagcgtcatccatgtatggcatcttcttcgaagagattaaccatgcgggcgacggcggcttgtatgccgaactggtgaagaaccgtagtttcgaggaactggaaatgcccgaaggttactatgccgagggcgatgtgctgcatccgaagaaagtgtgcaatcacatttcgggtgaagtgagagaaggaagtttccgctggactaccgaaccggtgccgggctggactctgagcacaaaggatgctgcggaaatgaaactgaccaaggaacaacccaagttctccacggctccgaacaatctgaaggtaaccattaaaaatgcttcaactcctgttcgtctgataaacaaaggatactgggggatgaatctggtgaaagacaactcttatcagttgcgtaccattatccgccctgcttccgattacaagggaaaagtgactgccctgttgctgtccgagcaaggcgaagtgctggcttccgctcctgttgatataactgctgccggacaatggaacgacctgagcctggcaatgcaacctacggcaacttctgccaaaggaaagcttgctttggaatttgatgctccgggtacagtctatgtagattatgtttctctcttccccgaaaaaactttccacgaccgtccgaatggactgcggaaagatgtagctgaaatcttggagggattgcaccccgcctttgtacgctggcccggtggctgtgtggtagaaggtatctcgttggagaaccgtttcgaatggaagaagtctctgggcgatcctgccgcacggtcgggagaatacagtacctggggctaccgttgctcgtatggtttcggttatcacgaaatgttgcagttctgcgaagatatcgatgcaaaggcaatgttcgtctgcaacgtcggtctgggttgccagtatcgcatgggagacgcttcaccggagagcaagatagcttactatctggacgattgcatggatgccatagagtatgccatcggcgacgtgactaccgaatggggtgccaagcgtgccgaacagggccatcccgaacctttcccgttgcaatacgtagagattggtaatgagaactggggcgatgagtatgacaagcgtttcgatatcttctatacagctatcaaagcgaaatatcccgagttgatcctgatttccaatcacggtttgggtggaacgggtaagattgccaaaacggatatgattgacccgcactggtacgtgaatccggaattcttcttccagaacacgactatctttgataaccatccgcgtggaaaatacgatgtctatgtaggtgaatatgcttgtaacgccaatgtaggcggtggaaacatgcgtgccgccctctcggaagccgcctttatctccggtatggagcgcaacggcgacctggtgaagatgacttcgtatgccccgcttctggagaaccggaacgaccgttcgtgggctgtcaacctcatttggctggatacggaccaggtacttggacgcagttcttattatgtacaacagatggcggctgaaaaccgtccgacgtacaatgtgaagagtaatatgactatgagcactccacggatagccgattataatgaaggacgtttcggcttcggctcttggcatacacaagttgaattcaaggatgtgaaactgaccggagcagatggagcgcccattgatcttgatcttaacaaggcggtgaagaaagaaggcgaatggagtctggataacggtctgttgaagcaaacatctctgagagaaccggcgaaatacattgttgatggcttcaatggcaaccagtttacactggagttcaaggttcgcaaagaaggcggtaacgaaggtttcttcctctatttcggcttgtcggaggacagtaacaaaggttttgtatataacgttgccggatggaacaatggtacgacggctgtagaaggagttataggtggacgcacttccggtgtggcaggcgaccgggtatctcacagtctcgaaaccgataaatggtacgacgcgaaactggtggttactcctcagaagagcgaactcttcatggatggcaaactgatattggcccatgccccggagacgactccgcttcagttcttctcttccggttatgatgaggcaaccggtgaggtgatcgtgaaagtggtgaactcagaggctcagtcctatccgttacggatcaaactggatggagtggatagcgtggagaagaccggtaaagtgatttctctgtccgcagccagtgacatggatgagaactcgtttgaagaaccaatgaagatctctccgaaggaaagcgaatacaaaggctttggaaagagcttcgattataccttcccgccattctcatatactatattgagagtgaaggcgaaatgataagtatagaggcgcttttgatgcaatacgtcatcaaaagcgccttttttttgacttatgccgtttgctgaaagcctgaaataggattgtaccgcagaatggaatgcatatacatgcggcagatttgcatgatttcttatccttatgcaagctttatgcaatgagtataggttttgaacagatcatacaggtattccggatgaacggaacaagtattcttgttgagtataacaagcattccggacgagcggaacatgcattcttgttgaacggaacatctattcttctgaaacggagcatctattccgggcaaaacggacctactttcaacataacaggattgtccgtatttttatatcattctattagttaagcagatgcgaattttcttttgtatatttccgatgtacctgtgcttcggggctaaagaaatgattctcgatggcttaggaatgcaaaatgtcacaatgctatgatttcatatttgcatattaaacgctatatttgcatattataaatctgtgatgggtaagttcattaccatactcgtcttgaaataatttcatcagcaactatatatctaataaatacagtctatatgaaaaattacctatttcgtattttggctcttcttcttttgggaatctgtggccctgctctgttgtatgcggctacggaacatgctgtatctattgaaaagctcaaagtggaatatgctgaaatgccattgggtatagatgtggaaaagccccgcttcagttggcagatggtaatgcagaatgccgaaagggggtattcgcagaaagcctatcagataacggtgactgacgaagctggacaaacggtatgggacagcggaagagtgtcgagtgacctgtcgctgaacattgaatatgccggtgctcccctgcaacccactacctgctatttctggacggtaaacgtatggaaccagaagggtgagcaatcttcctcgacctcctggtttgaaacgggactgatgagtaaaaccaatccgtatgagggatggagtgatgcgaagtggataggtggcggagatgaagacatggtgctctattcccactatcttccggtgttcagactgaacgttgcactccggttggataaggagacaaaaagtacccgtgcaggctttgtctacggagcgaatgataaacgtctgatggataagaataagaacttgtatcagttgcagaacgggaaagatgagtcttacataaaaatagaactggacttggattcgcttgcttcgggtaaagaggcgatgttgaatgtatatcgtgtagggtaccacccggatgatcggaaagatgttcctttcaagagctttcccatccccctgacattgattaatgaaagtaataagtatgaccggcatacggtgagccttacttctgatctgggttttacaagattctacgtggataatgctgaagaacttggttggataaatctgaatccgctggggcagggaggtgatttcatcgctttcccggtagttggcgacatcggctttgatgttcccgccgggcaatccgctactttcccggaaatggagattgccaacttcagaagcccttcgaacgtgattgctacttgccgggaaggaaatagccggatagtcggcggcacttccggtgttcttactatattcactcccgaaggaagctccgcaccgatgcttcgtacggtcttctcttctcccgatgcggagattgtaaaagcccgcctgtatgttacttcacgtggcatttatgaggtctatctcaatggtaagcgtgtaggggatgattattttaatcccggagttacccagtataacaaaactcatctgtaccagacgtttgatgtgacaaagtacgtccattccggcagaaatgccctgggtgctttgctggcagaaggctggtggagcggtggcgctacttttacgggagataactggaacttcttcggtgaccgccagtctttattggcaaagctggttatcacgtatgcggacggtcggaccaatgttgtggtgaccgatcctttgtcctggcagtatttcggcaaaggccccgtcgcttacggaagtttctttcagggcgaagtgtatgacgctttaagagaaccggcagtggaaggatggagcacggcatcttatgatgcatctgcctggaaaccggctcatgaggttgctttggaaggacatatcagtaaggcgggaaacccgaatatgccgtgggtgaacgattattccggttttgaacttatcgggcaattcggccagacggtgaaacaaatcaatgaactgacggctctttcagtagaagaagtccgccccggcgtgtttgtgtacgacatggggcagaatatggtaggagtcccccgtatcagtttgtcgggcatgcagcccggaacggaaatcactctgcgctttgcggaagtgaaatatcccgatttgccggaatacgaggggaatatcggcatgattatgctggagaatatccgtgccgctatggctcaggatatttatatcgctaaaggcgggcaggaaaccatctctccccgtttcacctatcatggctaccgctttatagagataacgggtattgacaaacccttgcctgtggaatccgtgaaagggatagtgctaagctctatacacgaactggcttctcactacgaaacttccaatgcacgggtgaaccagctgtggaagaatatcacctggtcttcttacggcaatttcctctccattcctacggattgtccgcaacgcaatgagcgcttgggatggagtggggatatctctgtcttctcccgtaccgccacttatctggcggatataccgcagttcctgcgccgtcacatgcgtgccatgcgcgatgtgcagcggacggacgggcgcttcccggatattgccccgctgggtggtggtttcggtggtatgctgtggggcagtgccggaattacggttccctgggagtgctaccagcaatacggagataccgcactgctgagcgagcactacacagccatgaagcgttatattcaatatatcattgaccaaacgattgagacggaaactaacctgatcgtgcagacccgttcatggggtgacctgtgcgactggctgggattggaggatgagaagaatgataagtccctggtatgggaagcttatttcatccacgacctggaattgatgacgaagatggcggcggctttgggcaagacatccgatgccgcatggttccgcgacttgcatgccgcccgaagggatttcttcaataagacctatatagagccggaaagcgggaaaacgatattctccgctttcatccctgacaagaaggggcaacctgtcgatatacagacttcatatgtgcttccattggctttcggcattattaatgaagagaaccgtaataaggtgattgctaatcttgcggagacagtcagacgggagaataccactgatagaggccgcctgtgtccttcttactctcttatgaccggtttcatcggtacggcatggatcagtaaggctttatccgattacgggctgaacgatctggcttacaggctgcttcaacagacagattatccttcgtggctttactccgtggaacagggggcgactaccatttgggaacgtctgaactcttacactcacacggatggtttcggtggtaacaatcgcatgaactctttcaatcattattcttttggtgccgtgggtgcctggatgtacaattattctttaggaatacaacgtgatgaggcttatcccggtttcaaacagttcattctgaaaccgatgcccgatccgaccggaaagatgaagtatgcccggggatattatgactcgatgtacggacgtgttgagagtagttggagagaggaaagaggcatgatccattacgcttttacggtacctggaaatactacggctacgctgtatttgccggctgcatcgttgagagatgtccgcgaaggggagaaacttatccgaaaatgcaagggaatagaatatattggtgaaggaagcgggcaggtagtcttgaagcttcttcccggtagctattcgtttgaggtgaagaaggaatatccgatggcggggaagaagaggaagaaaggtgagatagccagatctaaaggaactcattgaaaaaacaaactgaagattgtgggcaacttttaaccgcacggacaaaaaagtgctgataggtttaaatatgaatcttggttctcctaccagtttgtcttttctcaggaatcagggaattgagtcttcgagtaccgctttcagtagtttgaaacgattgagtaaattgggttatgtcatttaaagttaacttcttgcgaacaaggaacagacttttttcatcaagcaattgcataaatgaagtatattatacgggaatcctgcatatacatgccgctgtatatgcaggatttttctatttccacttttagagataaaggagtatgttgctgaaatgttttaaaggcttactttcctaatttgttgtagcagtatccgctttcgcgttccacaccagtaacgcaagcaaagtagatagcagtgcagccccaatccagaaccaattgatatatgtgaaatcatacacatccgttccgtttactacagtcttttgcccttctatcaatacaccgctcatcacatcctgtaaccccgcaccgatgtaacttgcaattcctaccacacccaaagctgcacccgaagcattgcgcggagcaatatcaacagccatcagtccacccagaaagcaaatcagtactccgatgccaataccgaaaagtaccattgccagagcatccagccagaagtgaacaccgggaaccaacaaaaacaggcagagagccagtgtatttgtcaatccgaatatcagtgcgggaacatttcggcgccctttgaataacctgtcggataccaccccggaaagcatggttcctacaatgccgcataccgaactgatagagataatgaaactggcatccagcgtagagtaacctttctgtgcttccagataaaaaatcccccagctatttaccgcataacgactgatatacataaatgcactgctcaatgctaatatccagatggcagggcttctcagtacagctttttgggcacggttgaactccgttgtttccaatgcactcatcactttcttttctttcggggcattgaccggaggaagccctttgctctgtggtgtgtcgtgaaagaaacgccagattatcaatgtacccagcaaccccactaaccctgcacccagaaatccgtaccgccagcccaatgcactcacaacggaagcgataatgataaatgtcatcgcttctccgatgttatgactggcactccagaaaccatagaacgagcctcggtctttatccgtaaaccaacgcgatagccctactacacaagatgccgctcccatagattgaaaccaaccgctgataccccataagatggcaaacagtatgaatgagtttataaaacccaggcaaaggtttatcaatgccgtcaccaacaaacctgttgacataaaccggttgatgttgctcctgtccgcaaggaaaccgttggagaacttacctatggcatacgtgaagaatagtacagagcctataatacctaattccgtttcagagaaaataccttcgtctacaatcggctttttgacgacgttcaggctcagccggcatacatagtacatgctgtatccaagggttgctgccagaaaggtagaccattgcaatcgttttaaccgttgcttctgttcgggcaaaaaatccccgttacaaggtgccggagccgacaccttgtaaaaatcaatgatatgtttcaacatgcttttcctcttattcgtgcagtttcttttctttcaggtattgaagcagtagggcgggacgatccgtctgaatcagctttgctccctggtcaatgatccatccccaactttcatccggttgatgcagttctacggcacggtcatcatcgtgtccgccacagagttcgggccagagggagttgatgaaaatctttgcaccgctgtcacgtactttttttatcagtcgttgtacctcgggactgtcattgttgaataccagttcaaaagcctgcggtttcatgtgttccaagtatccgtcgatggtagcttccgcactttctttatgcagttggaccacgggcatgaagatcattttatccagcacttctccgttttcggctttcacttgttcgtagggcaggctggctttcatgatacattggtctaccgtacctgtctttttgagtacctcgtacgcatccttgaagtaatcatagcctttgtctacattcaccatgattttgcctttgcacagattcatgacttcttcaaaagtcggtatctgatgccgggttttaatcccggcaccgtttcttaatctcatggctttcagttcagccaaagtatactcatccggacttcctgtaccagtcatggtgcggtttatggtcttgtcatgcattaaaaccagatgcccgtcttttgtcttttttaagtcgatttctaccatgtctgcgcccatatcgatgcagttctgaatggcttgcaaagagttctcgggtgcattgcgccagtcggcacgatgggaaacaatgagtattgaccggcttgcaggttcattgaagcacttttctatttctttgaagcgtccttgtgcaaatgctgccagaaagacggtcagcagtattgaaagtgatattattcttttcatcttatcttttctttttgaagtttaaatgattcgttgttattgtttgcgtgcgcttcttcggtagtctccgctgcgcatagaccagccttgttgtgctccgattgcatgagttctcaatgcgtatactttgcccggttccgaggactttgtaacatctgcacagatgtagattataccattcttatcaatgaccggagaagaccagatatttgctcctaactgaatttccttataactcagtttaccttttgaactcagcacgtagaaatagcctttaccgtcaccgaagtatatgtttccgtcattgtcgatggcaggtaccgaacgaatttgtccctgagtcctgaacttccagatcaaatcaccgctttcctgagagtagcagagcatatcgccgtcagagttacccacatacaattgtccgtctatactcaatgagataccggaatttgggaaagtggcagccgacttttgttgccatctcacggtaccatccggatttacagccattactattccaccgtcggccgtttcaccgcataaatagatggtgccgtcttctccgatagcgggaacggaagtgcaagtttttccatattcaagagtccactttttcgctccgtcagttttagcaagagcatatagtttgccactgttggaacacatatataccgcatcgttgccaatcacgggagtagattgtgtaacaccttcacagtcgacattccatttttcagtcatgccgggtgcggcatggatggcaaataactttctattggcagagaagtatactgtaccgtctttgtctatagccggacaactgaacttggccgttgcacccaggtcgaacttacccaacggatcggaggaatgagcggcgaatgcatacaagttcttgtcgtaactgcctatatagacggtaccattatcagctattgccgccgaagaacggattacatcaccggaagagtaatgccagacctctatccccccgttaatcacccagatattttgtccgccgcgggcattgttcgcatcacagccgacgaaaacatttccattgtcatcaatggccggagaaacatcctgaaaaccgcatggtgtctggaactcccatactatttcaggtgccatgtcagccgttgatttctcttttacagtgattgttttgttgaaagtatttgcattctgaactcccaggttatcccagacggataaagtcactgtatattctccggctgtggtatactccacagtgggtgattgttcttcagaagagactccattgccgaagtcccaggcccatttggtcacctgtccgtcttcatcaaaagacaagtctgtaaaggctacatgttgtccttcttctattgtgacttcactcgtcttgaaagcagccaccggctttatatttactttctcgtcatcgctgcacgatatccataaaagggcggtcagcattattatgattgtatttttcatctgtgtatctttttaattgtttttcaaatactctttcaattccaccgggtaatcggtttgtatgatacttccctgcttggcaagaaatgcctttacctgtttgtaattgtccgaggtaggggtgatactcgtatttatatagatattcttgaacagggagactccgtttccggatgccttagccagtatatcctctgtaaaggctgcactattgaactgtgccaccggaagtggtttgcagactgccaggtaattctccatatcctgcatttcataaatcaccggcagcagaatggcattcctgtcaagattgatcacttttctggctgtagacacatcatagaccgtgaacagtacctgagagagcattccatagcgcttcaccagattgtatacggctttataatcggagatctttacgtctatatctatatagattttgcctctggcagctaacaatatatccttgaagagtggtattttttcttctgtcagtgctccgtcatggtaaaggttatatgaaagcaactccttgtagttcagttctgatactttaccggtaccattggtggtgcgttcgattgtggtatcgtgcatgagtaccatttctccgtctttcgatgttctgacgtccagctctatcatgtctatctggttttcgatagccaatgtgacggctttgacggagttctccggtgcatctttccaatatccccggtgggcgcatatttgtacatgatccttgttctgcaatgaagtggtgatggaaacccgctgatcttcgctgacttccggatactcaacctccgaaggttgaggtctgggcggagtagaaggttcactttcgtcgctgccacatcctgtgagcagaaacagagaaaagaatattccgattatacagactttgtctattttcatgattcgttccgctttaatcatttccaattcggattctgttccagattcttattcagcatgatgtcgcccgaaggtatcggatacaggtaatcacgcgtctcatcaaatttctttgtgatattcagaaagccgaccagataaccatgatctccctctgtgagctggataacaccgccaatcttaatcttttgtttggctttgctttccggagctttatcatcatagagcaaaagatcgattgttccatctccgtccagatcgaattcgcccaatgaggggaaatacataccagtgaagtggggttcaagcagttttcccattttccagcgcatcaggtcgtcatagcggaatccttccagggccagttctacacggcgttcgcgtctgatttccagaattacccctttattgtttccacttacattgggatattcacttgccagtatcttgtcggggttagagttggctatgttctgattcaggttaggcattccggctcttgtacgtatcggcctgatggatttgtctatatcgtcctgagtcaatatgtccagttccgctttggcttccgcatagttgagcaggacttctgcataacgtataatggctacatcctgataagaagctccgtctccgtcctgtgtttccttggagatgaatttggcaatctggtaacctgtcatggaggcttcgagatcaggtagcaacggcttgtcgctgtcaatccgtgtatagccgacggaacggatggtttgcgccagacgtttgtccctgttcttcatttcatcgctgaacatcatggttgcataccctgtttgtgaggtgaatgccgtgccgttgtttagcaggtaggagtttacaaagtcttttgtcaaacctacatcctgttgggtttttgagaggaaatagtagttcgtattatgcattttgttcaatgtcagtgaataacgcctgcccaggataacttctgtttccttcagatcatcggaagcaaacaaatccctgtaatcaatatcggagttccccgtggaatataaggtgtatcccgattcgttcatgactctttctgccgccttatatgctttctccaatagtttaccggcatcaggcagattcagttccgtgtgatatttgcggtaggtaccttcatagaggcatacacgtgagaggaaggccagcgcagtccatttggaaatctggtcgggtttgcgggtagtgcctaaacggtctactgcaatctcaaggtcttcaatcactttgtccattataaattcgcgtgaatctctgggcttgtatagcaaatcttcatcatcggtctgaatctccgtatcataccagggtacaccaccgaaactctttaccttatcgaaatagaaccaggctctgaagaaacgtgccacgccttcgtacttcagtgcggctactttgtcttcgcagcgtgtatagttgtcgaagaagatatttattttccggagagtactccaactccaaccgctactgccggcttccgatggaatgtctctttccggactccgttgttccataggtacattgctgtagagtacgttgtccgagatattgtctcctctgacgatatcattgattttaggcaggttctcatagaaaccatttgtgtacaattcaaggtcttgtgcagacttgaaggagttttcaggtgatatttccgcaatgggatatcgatccatgaacgagttgttgcatgaagcggcacttatgcctatcgcacacaccacacaaacttttaatatattgaatgtattcatagctgtttcctctttaaaatttaaaatcaaaaccaaaggcaaatgtcttgctgaacggataggcgttgccatcgcccaattgttcgggatctacggtgcgatcctcattatgcttgtacaacggggagaatgtcaggagattagtgcctgaaacataaacccggatgctggagaaaccgattttgctgcaaagtgttttaggcaacgtatagcctaaagtgatatctttcaaacgaacgtaagccgcgttttgcagatatttatccgaataaacccttagctgggctccttcgtagtcaccgccttcgttggctgcatacacggccaggcgagggaaatatgcattcggattctccggtgtccaggagttctgttcgatgctcttcggataaaaattctcatactgacgggtaaacggtccccagaagaaactgttgtcttttcccggccaccagtctcttttcattattccctggaagaaggcggaaaaatcgaaaccactgtaattgaatcccaggttcagagaacaggagtatctgggagatgtgttaccgatgatgcgtaagtcgccgggattggacaaggtcttgtcgcccggagatatttcttcatttccatccaagtctttgaatttgatatctcccgctaccgggtgattaatcagatagttgcgctggattcttctgtttactttcgtctggtctgcatgatccaggtattccgtatctgtctggaagaagccctcaactgtatatccccagatttcacccaggcgtttgcctttatagaactggtctatctggccgtcggggttatcaaatttggtaatctcagtgatgttgtcggcaagagtgaaccctaccctgtattcgaatggcctgtgtgccaacaggaatttgtcttgccatttcacagagagttcaaagccccgtgtgcgcaggttggcggcattctcctgtggttcggaagttccgaatacggacggaagttttttgccttgtgtcagcatgtctttcgtatcacgttgataccagtcgaaagaggtagagaaacgtccgttgaacagagagaagtcaattccgaaatcaatggtctgtgacttctcccaggtgaaatttgaggaaatggcatcaggagcagtcagataactcaggtatgagccgtctaccagataatctccctgcgtaactttcattttagctatatagtcgtagggacctacattctggttacccaatgtaccataagatacacgcagtttcagattgtctatggcagacttcaagggcttgaagaaaggctcctcacttacacgccatgcgaaagagcccgatgggaagatacccagacggttatcgtgcgggaacttggaagagaggtcgaaacgaccgttgaattccagcaggtagcgtcccagatagtcatagttcagacgatagaaagctgcacggatggcccattcgtccgcatttccctgtacttgtacattctccccggttgccaggttgaaggaacccagttcttcggatgcaggcgaactgcgtcttgaaacggtacgttcccaatgcctccattcctggttgaaaccgatcatagcttttaagtcatgtttcttggcaaacagatggctgtaggtaccgaaagcattgaatgcctgatagagggttgaccaatgcatttccttatacagtgatttattgggcatgtagcggcttgttccttcaccgttcggctggttggtgtgtggagtggaaactagcagcagtttggatacggggctgcctttccggaaactgtagtcagcattcagtatcacatctttaataggagtcacctgtagtgagatggtatttgaaacatcatgttcctgatccacacctttactctttccgtatgtcaggtcggcaaacgtaccgtctgctatgtcacgaccgggagtgtaagcaccgttaatcaggatggttccgtccggattgcgtggatggaataccggggaagcgtggaaggtgtattttctccagtcctcactgttgtcgctacctcctacattacggttgttggttgccggatagtcgtaatcactgaaatagatgttggtagagttggttatcttgatggcggaagtcaactgaaagtcaatcttactgcgtaaagtgtaactcttcaacttgtccgggttgatgcggtaaattccctctcttgaatagaaccttccggagaggtagaaacgtactttctcactacctccggagatattcaggttgtgctccatagacggctggttatcctggaagatgtagtgccaccagtccgtattcccatagtgtacatagcgttccacaccgtcaacggtctttatcagggtcgaagggagtgagggatctttcttgcgggcttccatataggcatagtcttcttcagtatatcccaaataagtactggtgttttccaaaagactcagtttatcgctcagacgcgcccattccagaccgtcggtaatgaagttatccgtgttgatggtagggttgctccagccgaagtgattggagtagttcacctgtatcttccctgcattcgggttctttgttgtaatcagcactacaccgaaagctgcacgggcaccatagatggcagcggaagaggcatctttcagaacagaaatggattcgatatctttaggattgatataattcatatctccttccactccgtcgataagtaccagagggctgccaccattgatagagcctaccccgcgtacgtcgaaagaagcttttgaattgatagagccgtcgctgaacgaaacatttaggttggggatcataccttgcagcacttgtcccgcattgccgctgacgcggtgttctatttctttagaggaaatttggtctacggcacccgagagatttgcctttttggtggtaccgtatccgacaacgattacttcatccagcatttcggcatcttcctttaatattactctggaaagttccttgctggatgccggatagctcaacggttgataacctatataagagatgctgacggtagagttctccgggacgtttgacaatgagtagtttccgtctacatcggtgatagtgccgttggtggttcctttcactacaatgctggcaccgataaccggttctccggacgaatcgactattgttccggtaatggttttggtcttctgactgacagcctctttgtgcagcaataccactacattgtcactctccatcttgtaagtcagttcttttcccgccagcactttctgcatggtctgggcgatggtggcattacttacgctgaaagtgactgcctgatccagtcctgccagtttttcattgtagaagaatttgtaatcactgacctgctcgatctttttcagtgcggcacgcagcggagtattttccacggtgacggtgatctgcgagaaaaggctcagtgatacactcaagaacaaagagaggcagagagcccgcatagttcttagatttttggttttcctgtctttcatatcaaataaattaaaagggtttgataggtatacaggttccctcatactgctgtccaagcgactctctgtttttaactcacattaacaaagagggacttatttctcttttaatacaatgacagagtcctttacttcgtaacggaacggagaggttaacattataatattcaaagcattctgtataccaccaccgggtattgttccggtaaaccgctcttttgcaattcgcggagagtcgatgtgtatcgtgacgtcataaacgcgtgaaagggctttcatgatattgtccagagattcattctggaaatacaggctgcctttggtccatgtcacgtaatcttcgggatagactttctcggtagtgaatttgtgggtggatttattatagttcattttctctccgggtttcatgatcagggaggaagaaggagtatgcacaccgacttttccttccagcaacaccacggttacatcctgttcatcttgataagcgcagacgttgaatacggtgcccaggacctttacttccagttcgcccacttggacaataaaagtatgacgggtatcgtgtgctactttaaagtagccttcaccgtccagttgcacccggcgttcgtttttgccgaaatctctcagatagctgagctgggaagcggagttgaggataacgtccgttccatcaggcaatactactgtggctttgtctcctttatcggctttcacaataaagggtgattggatatcggtgtccgaaatactcaggatgttgtaagtaaagaaagcgatgaaaataggaatacagatcatagctgcccatcttgcccaagcgggaacgagagcttttcgcggagaacgtccggcaggtttcgtatcagggatgcggacaggttcattgaggacttccgccttgatccgtgcgaacatcttgtcgcgcagggcgagagggatgtcagtgtcggatttttcaaattcctcttcccaccagtcggacagttgcacgttgttgcgtatccatccggccagttcgctgatttccgcttctgtgatgtctcctgcgaaatatttctcggctaagttcttataatattctttctccatcttcttacttatttatatagtatacagttatccttgttttcgtatccaaacgtatcgggcattattgcatttcgttaacaaaaaaggcccataagacaagaatcagcttatcataatgctttgcaaattgctcgcgcatgaatttcacggcaagtgacagttgcgtggcgactgtactttctgaaatacccatcttctcagctatttctttattggtatagccctgacgtttgctgagcagaaagattttcttgcgcgaagggggcagttcttcggccagcgaatcgatatagtcgttcaggaagcgcaggtctgtgctttcttctgtctgatgatcccggtcgggattgcttttcagcaggtattcggtatagatgtattccactgtctgatgctggtacatattcatcgacagattacgggctatggtgcagaggtaagaaacgaaattttcggtaggatccactttctcacgcacttcccacaggcggataaatgtctgctgcactacttcttcggccatatactgattgccggaagagagacgcatcataaagttatagagtttgccgctatacagattgtataacttctcgaatgcagaaaaagaaccctccttcagtgattgtagcaattcacttctattttcgtttgcaatcatatattattgatttaggcttcaaaggtatgccttgtgcttacgtaacaggttgcaatattattaataatttccggaattaccgaatagcgggatttctttttgatttgttggtggcttgtaaccgtatggcttggtatctaaatgctattttatacagctttattttttgtacacttttcctttgtaagatgctgattaatagagtctgtttgtagtaaaagtgtacaaaaatgaaataatctatttgtttggtttttgctgtccttgcttgtcagaaacacactgataagactcttatatagtttttaaatgactacggttaaggtatgggcataaaaaaaggagtaccgctgtactccaacctttgttaaccttaaatctaatactatgaaaaaaatcacatgacaaatataggggttcatcctattccctccaaatatctgttagtgtttgacattccttttataattctttcacggatattcactgttttcgcacacgaactgtctttttgagataatataggggtggatagtggctaaatgattatcgggcggaaaggggaataaccatagtacataggtgacatacatgtataagatacgtttattttgctatatggataatcgcatgttgattactgtcggtaagtcgtttgactattgtcagcaagcatgctgattactgtcagtaaacttactgacagtaatcaaacgctatggatgtcctatgcaaaataatataatgtattctagattagttgaatagctaatgacctgtgattgaaaaatatccgttggcaatgttgcagaaagtatgtggatatacccttccatccgctaaggctgatggataaggaaatacgggggtgtggaagggtatgaaggaaagggaaaagttgcaaatctgtttcattcgtttcacagaacctttcacctcccgaaaagagttgtaaaacgtgtaatttcttcaattataataatatatatttgcctccatacaaagcaaagttatgaaggttcgcgtcggtttatatatacttttgatactctttcttttgatatcaggcaaagaagaggcgcgggctggaagatatgcggcgaaaggagatacttgtagagtatcggaccggatgaatcagccggaaacctggagcaaaatttaccaatgggtgatggacgacccgcaagtgccggataaagaagatgtgttgatgttgatccggtatcacttcgggaactttgaaaagctgagaaagctgttgcgctatttggatggtggcagaccttacgtttatttatcggaacatcagttccggaagatagaacggacagggaagatgaaagacagtttgccggtagctgcattaacattgcctgcgaatactttgccggaggagcaattggaaactatagctttcgctccttggcttgaagtggaaagtaagcgggaaaccccgcacagaacagtgcttgcattgaagaacaatatactttatgatttagctttggctccgaatgtggaggtggaattgcccgtagggcagcggtggtctttgaatatggaatataaatgtccctggtggtcgaacagcaagcatggcttttgttaccagcttctttcgggaggcgttgaggcacgttgttggcttggaaaacgcaagaatcgtgagcggctgacaggacattttctgggaatatatgccgaagggggagtgtacgattttcaatttgacaaagacaaaggatatcggggaaactactatgcagcttccggtctgacgtatggatatagtcatcagctggcacggcatctggctcttgaatttagtttgggcattggttatctggcaacagaataccgcaaatacaccacttacgaaggcgatttgatatggacgaacagcggacgctatcattttatggggcctacaaaagtcaaaatctctttggtgtggctcattaagggaaggaggcgatagctatgaggtgtacgcaatatgtgtttcttttacttctgttcgggctgtcggtgctgttagcaggatgtgatttcagagacatactggatgattatcccgtcagcggagtaaagataaagtttaactggaagggagtggataagttgcccgaagggatgagggtgattttctacccgaagagtgaagaaggtagaaaggtggagagttatctctcggtggaagggggagaggtgaaagtgccgcccggacgttatgacatggtgatctacaattacaatacggagagtgtgttgattcgcaatgatgaggcgtatgagacgattgaggcttatactgattattacaaagggcttgaaacaagtgagaagatggtatggtcaccggaccctctatatgtagtaagtatgaatgatatgaggatagaaaagagtgaagatgtgcttttgatggagtttcaaccgaagctggtagtcaagaactattcttttgaaataaaggtgaaaggattgaagaacgtggcaagcattgtttgtaatgtggatggaatgaatggggcatattgcataagtaatggctcatgtacggcaagcattgctcctatctatgtggaagctcataagggagaggatgtgatacgtggtagtttctctgctttttctgtatcggagtctgcgaatacacgttttaccggaggggtggtaatgaagctattgctagttaaggtggataatacgattcaagaaaccaaggttgacatcacggcggctgtagttcctcccccacccgaggaagaagaagatccggtaacggatatcgagataccgattgaagaggaaattgaagtggaggatgtggaagttcctcccggtggaggcggaggtattggcggtgatgtaggagactgggatgacgaaacgaatgttgagttacctgtaaattgaaaagcaaaacgaacaaaatattaacttataaaacaaacgattatgaagaagattttattggcagcagttgctgcgttggcaatcgtaggttgctcacagaatgaagagattgagaaggctggtgaaaaggcggagattaactttggtgcagtagtgagaaatgctacaagagcgactattgtgaataatgcagattttaaatcctttaaagtttatgggtataaaacggcagataaaatagccgaaaatgggcaacttggagcatttatacctggtttaacagtttcaaaggagggcgatactgataattggagttatactgatgatgcatattattggcctttaagcggatatgttcagttcttttcaactgtaccggaacgaactttaactgttggaagtggttatcctagctttagttacaatgttggtgttataggtgatcaaaaagacctgttagctgcaaatttaattgataaacagaaagatgctggtgatttacaacttccattctgccatttattgactcaagttaatttctcaatcaaaggtgatgttggatttacctatacattaacgggactggaacttataggtgtgaaagatgagggtacttttacttttgacgggtctgcaactgcaggaacttggactgaagttaaggcatcaactactcctgcagaatatgtctttacaggttctgttgaattggtttctacaagcaatgatgattctgctaatttagagtcagctaatagtgctttatttatgttattacctcaagatattttagaaaatactgtaaaggtgaaagttacttattctgcaaaagttactacagaggaaggaaatggtcaatctactctcgaaaatggtgtaaaagaagtatctattcctgctgtaaaatgggagaaagggaaacgtgtacgctatactttgaacttgacaagtgatgcaactgaagtgacatttggtaaaccttcatgggaaaattggagtgatgcaggttctcaacctgatcctgttactcctgtaactcctcccgctgaataacctttcctaatcctataatctccctccccgaagactttcttcccacaaagtcttcggggatttttttgtttcttcccggaatattcttacttttgctgcacaaaacaaacaaaaaaacattcaatctgcaatgcaaacttactctgcatgtggtgcggctatatcgtgccagcagtgccctaaggctgtgggtaatgctatcatttatgcctctcattcaagaggcttccaccttccagctcaaaaatgcgaagaaaatataatgatttttttattagaaggagaagcacttgtcaatagccaggagtatgccggaaccatactgcgtgcgggggaattcattcttcaagccattggttcaaaatatgagatccttgctctgacggatgtggaatgtgtttgttatcgttttaatcagccggagtttttctgtgaggaacgttataaatacattatgaaagaaataactccaccgctgatattcaccccattaaagattattccggaattgcgtttctttctggacgcttccaaagcctatctggcgaaagagaagatttgccgggaactgctttcgttcaaacgaaaagaacttgcctttcttttaggagaatattactccgattatgatctctcgatactggtacatactctttcccgttatacgtccagctttgagtattttgtcctgcaaaatcatctgaaagtgaagacggtagaagaattagcccaattaggcggatacactgttgttaccttccggcgtatcttcaattctgtattccataaacctgtttatgaatggatgatggagaaacgtaaagagaacattgtttacgaactccgctatacggatgccactatttctgagatctgttataaatatggtttcgagtctttgcctcacttctctaacttctgcaagaagaatttcggaacctcaccccgtggtctacgttcagtgcagtctgttcctccaccagaaacgcaaactatttgtgaagaggctggttgaagcgatacttcactgagacaatgaagtagctgcctatctgttgcgtatggttttcataaagtccgtcggccattgtgcctcggaaataattcttttgttggctgagtatatccacccagttggctgatatctcagcctgtttcttttttaggaatcgccatgtgatacttgcgttccagacaatctggtcgtcttctcccttttttatgttcgtaccgtttcggaaggaataatttgcgtctgttcttagttgtatacctcccggcaaatcggcaaaaccgttcaatccgaaggtataattgcgtgtgtatgtatccgtctctaaaagtgagttggaagaatgttggaagttccacctaccgtttaagtccagattaccccatttaggttggtaggataggcgcaggtcactgttgaggccggtgttatgcgtggcactgcgttcaggttgctcgctctggttttcgttgatgaggttgacatcctgtgcaaaggagcctccggcatttgcactcagattaaagtccttgatgcgcttctgataccggaacacaccgcttatgttccagttgccgttaatatttaccggataagtttcacgtccaccggtttgctggttgtagatcactgcacgggtctgactattgattctgttgttccagttcagtgtggcaaaaagtccttccttcgtattttgtgcttccaatcgtacagactgattgtaagtaggcttcagattaggattgctccgcgtgatgttgagcggatcactgttgttggttggtgagatcagatcgtataatgatggttgccaggtatttccataataattcagggttatcctgtttttctttttctgccatgagatgaaaagcataggctgaaagccgactgagtggagggtggtatcagctctatgcagacctgttttctggttcaggctgcgccgctcgggttgtacggatactccggcattgatgttccaaatggtgtcggaataattaaagtgcaggttgattccgtgttgcagggtactgctatggctccggttgctcagactgtcgatgtagctcgcctcatatccttcgggcagatagccgggttgtactgcggtttcttccataaagccggacaggtcgtaggtattacgatcatttttctgcttactgtagttgaggttatatgaaatctgtgcgtgcagcttcttggaaaaaggatggctgaacatcagcccgatgccctgttgacgattgggggacaggttcgacgagtattggttacggtagagtatggagtcgtttcctgcactgtttttcagttgataatatgtggttgatgagatagagaagttattgttgtcattcttgctatcattgtattgcgcagtcaggccgatagaacttccttttttattgatccggcgcatgatgtttgcatggaaggaatatcggcgttgctctccttgcattagtgatcccatggcgatgtcattgattctcagttcatcgggtacatcgttgatatgactgaaaggatcgaggatatccagatgaggattttcattgaacgtggcttggcggttattattggcattattattccggacaaggctgaaattaccgaagaaattgacaaaagtcagggtatcgacctgccagtttaagcccaatgatgaattcatattgcgattgcggttcgtattgttgccggcagaatactggtacttattgccacttgtcagatattgctcgttgtaggatgtcgaaatattgccctgctcgttgtggtgataggatacatttccgttgagtgttagtttctgattgtacttttgggtgaaatttatggcaacgttctcctgtatgttgtccttgtagctggtccgcatatggaggttaccggaattggcgatgactgagaaattgtttccgttatttttgaagtagttgccttgcaggttgaaatcctttttgttgttattgccgtatccggcttttcccgatgcaagaagggtaccattgaattcttctttggtttgcaggtcgagcacatagttctctttccccgtgctgacacccgtcagcttttccagcttgcttttcttatcgtacacttttattttgctgattaactccacaggaagattttccaatgccatcttgttgtcacctgagaagaaagcttcaccgtttacgttgatttcgttaataggcagtccgttgtatttcagtgttttggtttcgctgtcgtattccattccgggaatacgtttgacaagtgtctccagatacgaaccttccggtgttttgtaagctgctgcattgatgacggtggtatctcccacctggtctacgtcgcgcatccgggcgtttactgtcacttcgcccaattcgataccttcttccagtaaaatgctgcccaggttgattgttgaagcgttgctgtccagtttgcggaagacagactgcattcccgtataagaggctttcagtaaatattgcgttcctttttgaggagtgaactggagattgaaacgaccgtccgcatcgcttgcaactccttttacaaaggtggaatctttgccttccaggataacaagacttgcatagggaagaggttcttctcctttttttgtctctgatgtagtgcacaccagtcctttgactgtccttgttttttgggcgaatagaatagtcggaatcagtaagaatagcaatagtaaccagattttgtgcacgttcatgtctgtctttttatggcagtcacaaaattagagagttttcgtcataaaatcttctttttttatagatattatgctacttttgctcaatataagtgatacaatgaaaaccgacaaactaaaatatgttttagcctttatctttttgctgtgtgctttttggtgcggagtcaattttaaacggtggtacactattaaccaccggatagaaaaaatgatttctcttgtttattcttcctctccccagtatgattgttacggaaactttgaagaactcttggtgaaggagttcagaaaacaaggcatagaaccgatatttgaaaagttctatctggatttcaatacggtcacgccggaagatgggataaaaaatatggaggtatatcttgaggtaattagagataaaccgatagcactgatgctcactgtgggcgatcaagctgcgtctgctttgttttctacccgccatcggctactttcttccattcctgtagtagcttgcaacgtacattttcccgatgagaaacttataaaagaatatgagcgtagaaaggtatatgtgctgcgtgatgcaccggattttaagcgcaacattgattttataagggctttacaaccacatgtagggatagatgtcatttataatattgatctgactcctcttggatataaatcgtttgacttgttaacccggtttgcagatagaaaggaaatcaggcttttaggctatgagtctgccttttctgtggaatctgaatacagaaaattgcaggaaatggttgagcattataatttgatgcctgctaaggtaaacaatcatattgaaaaggatgagttaaccattagtctttgccctttccgttataccaaagggacttctttgtttgtagacatggaaaaatcaaaaagcggacagaggagagagttttttctgttggataagtttgatcagatgtcgcttccgatcactaaagctttaaatattccctcttttagttgcatccgccagggatttggggaggatgccaagattgtgggcggctacatggctactgatgagatttctgcgcgtactgcggctgatttttctgttcgtctgatgaataaggagaaaattggtatgccgaaaatcagggatatggaaaaggagtatgtactggattggacctatttttcatcctatacggactttgatgtgaaaaatgtacctgaagatgtccgtattatcaattactccttctatgaccggtatcggaaggagctttattttctgccaggattgtttatacttacttttattctggtattgatcagtctgctacgtatgcgccgacgttcgcgtgtggaacgtaagaatatggagatgcttgaggaaactcataggcggttgatgctttctacagatggagggcggatttcactttgggatatacagggagagaatatcgagtttgatgagaattatacgcgtttggtgggaatggaacagagaacgtttgtgcgaaccgatttcttgaagtatgcatatcctgatgatgtacctcttctgaattcattgtacgaaacgctgcatcaatctacggatatgcaggttcggcgtgtacgtttctctttcagtgaagaagattatcgttggtatgaacttcggtgtcgcagtctgaaagatgcaaagggaaggataatgctggcaggcattatgcaggatattcagatacaggtagagcatgaagaacagcttattcaggctaagcagatggctgaaaatgctgagttgaaacaatctttcctgaataatatgagccatgaaatccgtactccgctgaatgccattgtcggtttcaccaatttgttggttggcgagggtggcgatgagattgaaccggatgagaagaaggccatgcttgagatcattaaccgtaacaacgaattactcttgaaattggtcaatgatgtggtggaaatatcacgtctggattccggcaacatggatctcgaaataaaagaatgggatatggcaacggttgtgaaagagatttatatggcttatcaggcattaatcaagccctcgttgcagtttcatctggctttggatgaaaatctctctttgcctgtcaatatagatcgtatgcgttttattcaggtcatttccaatttcctgggcaatgcggataagtttacccggagtggttctattacattaggatgcaaagtggataaaaaagaccggaaggtcagtgtgtatgtacaggataccgggaaaggtattgatgagaaagaactcatgatgatctttgaccgtttttataagactgacgagtttgaacaagggagcggacttggactttctatctgtaaagtcattattgagaagctttgcggacgtatagaggtacggtctgaagtaggaaaaggaagtcgttttacggttgttctatctttggcggatgaggtataagacttctgacgggttctttaaaataatagccgaaacatttgatatcgctctcagggtattgtatatttgtggcattaatctttaaatatgagaacatacaaaatcagaacgcaacgattcattctacttattctactcctatcctgcattacctccgttttttcttctgattttttccaccggatagcagaagatgacggtctgagtaatagaaggtgtttctctgtccagcaagataagcatggctttatgtggatttctaccaaactgggggtagaccggtttgatgggaaaaacttcaggcattatcctttgaatctatttcccgaccaggggtataaccggataggggtaaattatctgcgttgttcaccggatagtacactctgggtatttagcgaagcagggcttctttttcaatatgacgaacggaaggatgagtttgaactgatatatgctgtacgtgacttcttcaataatcattctattattctgaatgatgttatgttcgattcccctgaaacagctttcttgtcaacctccaaaggggttttgaagttgaacttgccggacagaatggctttactgcttcccggaaccgaagagttgtctgtaaatcaagtgaacaagaatgatgaccgatattatatttctacccgtgacggactttatataagcatcttcccccaaactggtcctatggaagtacgcttccgttgtctggaagggaaaaatgtattatcgacctatgtggatatggaaaatcgcagaatactgatcggtaccctggatgcaggtctgtatagccgttccttagaaatggaggacttacagaaattgcctctgccaattacgaagcccatacgctccattgtttcctatacactggataaaattgccgtaggagtggatttggaaggtgtctttgtcatagataaggctaacctgacaatagataaacaatatgcctacaatgaaacgtcttccacttctatctttacgaataatgtgcggggactttttgtcgataatcagttcaatctgtgggtggcaacttatcacgggggaatctcttttcaagactcttacaaattgaattttgactatttccagcatcggacaggtgattcgcaaagcatcggaaatgatgtggtgaatgcagtgctggaagattcttcaggtaatttctggtttggaacgaatagtggtgtcagtatgctctcagtgcacacgcacacctggacgcattactttaacaggaatatttccggtgaaaaaggaaacgcgatactcaccattgccgaagattcgcaaggacgtatatgggcgggaggatactctttcggtgttgcctgcatcgactggaaaaggggagatgtgaaaagatatcacgttgaggaccggaatcctattatctccaccaattatatttactccatttatccggatggtgatctgttgtggtttggaggaattatgggagatatcacttcactgaatataaagaccgggctggtaaataagtataatataagtaaggtgaatcagtttgaaagacagtcggatcgactgctggtgatgggattgtatagcggactttttattctcaacaaagaaactagtgagataaaatcaacagctatcaccaaagaagtaacaactatctatcggatcagggatggggcctactgggtgggaacaagaaactatggactgtattattatgatatggaaaacgattccatacgccaatacacagtggacgaccatctttcatctaactatatttatgggatagctcccgatgcggaaggtcatttgtggattgccacggaaaatggtctgaataaactgtctcctgatacgggtgttatcgaagtattcgacaaacaggacggtttgccatccaatcagttcaataagtcggcttgttgggtttgccgtaacggagatatactgttgggaagtaccgacggggctattttgttcaagccggatgagataagaaagacgaagcttcccacagattacgagacaatcgtttatcagtttgatgtgttcaacgaaccggtatattgtacggatgcatcaaatctgttgcgtgaaccgatctataagacagaccggatagaattgccttacaacaggaatttcttctctttccattttgttacacctaattatcagacaccgcaaaagacacagtattcttattatctggaagggcatgatatttcgtggtcgcttccggcttcgactcatgtggctacgtattctaaggtggcaccgggcagttacgtcttccatgtaaaatcggtgatagatggagtggatcagaaggagcggataatttatgttacggtggctgaaccgtggtggaatacgatttgggcacgcctggtttatctggctttgttttccctgtttcttttctatatttacaggatgatcaaacagaagcaggagaagaggaatacagaagtcaaaatagatttctttgtcaccacggctcatgatctgttgacaccgctcaacctgatacaggctccattgaaggacttggagaatgagattccgccttcgggacaaggcgctcagttgttgcaaatggccttgaataattcatccaagttggcgcattatgtggagaaactactggactttcagcgtgtatcactgaatgcaagccgattggtcgtttccaaacaaatgcttgaggttttcctgcgtcatcgactggattcctttaaattagtagcaggaaacaagtatattcatatagaaaacaaactggaagattctacccggcaggaaatctggttcgataaggagaagataacgcgtatattggataatcttctatccaatgcaatcaaatatactccttatggaggaaagattagtattgaagcatcggtagacgagcataagtggtatttgcgcatcaaggataccggtatcggaatctccgcccgcgaacagaggcatatcttcaaacatatcttcagagcggataatgcaataaattccggtgaaataggcagtggtatcggattgaagttggtaggagcgcttgttaaactgcatcagggcaaaatctctttcagaagcaaagtggatgaaggtacggaattctttttgtcctttcctttgacatacgagaatgcagtggaccattcggaaaatagtgagaatgttccacttggtcatgacgtctctgttagcgatcctcacgtaaatcgcgttatggtggtggaagacgatcccgaaatgtcccgttacattgagatgtcgctgagtgatgtctatcatgtaaagaccttcaataatgccgttgaagctttggatggcatagatgctttctcacctcaacttattatttcggatgtgttgatgccgggaatgacggggtttgagttctgccagaaggtgaaaggtaatataaagacttctcatattccattcctgctgcttacgggagttacggataagaaaagcatattggaaggtatgcgtctgggagctatcgactatattgccaagcccttcgacaaagaagtattgcgaagcaaaatagccaatatctttgaattgcggcaagccgcccaaaggcaatgtctggaagaactgaaaaacaacaatgccgtggaattgtcgaacaaggcggacaatgagtttatggaaaagcttttgaagttgatagagactaatatagataatccggaattaaatattcagatgatgtgcagtgaactcgccatgagccgtacgttgctatataataagattacccaactgaccggaaagtctcccactgaatttatccggattttccggctcaagcaggcggctgcgcttctcctttcgggagagtactcggtgacggatgttgcttttaaggtgggaattgacaatccgaaatactttagtcgtattttcaaggaattttatggtgtatctcccaaagagtatctggcaaaaagagaataagtaacgctactgaataaaagaaataaaaatgcggtgtgatcttaatggttacaccgcattttgtgtcatataagccttgtagaaggcaatctatgaacatctgtgcacctggaatgacgtataatgtacctctttcttttcccttcccgctacatttgcagctataaaccgaatggttttatgtaaggccggataaatttaatacctttattatatatgagaatttatttattagttatgatgcttccgattttcttttcagggtgctctgataaggataaagatccgctttatctggatgcttcccaacctgtggagaaaagggtgaatgatttgatgaatcgtatgacattgcaggagaaagtagcacagatgtcacaatacgttggtatagaacacatgaaagctgccgaaaaagacatgacggtggaggaaatgaagaaaagccatgccaaaggattttatcctgatctgcattctaccgaactgattgaaatgaccaaacaagggcttatcggatcttttctgcatgtaattaccagtgaagaagccaatcgattacaatcatatgccatgcaatcgcgccttaaaatccctttacttatcggcattgatgccattcatggtaccggactctacagaggagctaccatttatcctactcccatcggacaggctgcaaccttcgaaccggaactggctgaaaaagcttctcgccagactgctcttgaaatgcgtgccaccggtacccattgggcatttactcccaatgtagaagtggctcgtgatgcccgttggggacgggtgggagagacctttggtgaagacccttttcttgtaggacagatgggagcagctaccgtcagaggacttcagacaagtgactttacgggacaggataaagtactggcctgtaccaaacactttatcggtggaagccaacctgtcaatggtatcaatggtgctccttgcgatatctccgaccgtacattgcacgaggttttcatgcctccttttaaagattgtctggatgcgggcacatatactttcatgatggcacataatgaacttaacggagtgccctgtcataccagtaaatacctgatgaaggatatcctgagagatgcctggaaattcaacgggtttatagtgagcgactggatggatattgagcaagtgcacgaaaagcattgcaccgccgctacactgaaagacgcgtatctgcaaagcgtaaagaatggaatggatatgcacatgcatggtcccgagtttgcggatgccattatagaactggttaatgaaaaggaactccccatgagccgcatagatgatgccgtcagcaagatactgactgccaaattcaaactgggcttgtttgagaatccttatatagatgaaaagaaagtctcccaagttctgttcagtgccgaacatcgtgaaacagcactcgaaatggcgagaaaaagtattgtgcttctgaagaatgataataatctgcttcctttggatagcgaccgttataaaaaggtttttgtaaccggccccaatgctgacaaccagactattttgggtgactgggcttttgaacagccggactcctgcgtgactacagtcattgagggattgcgaatggtttctccccagactgactttgatttcttcccttttgccaccaatttgcgcactatggaaatgtctcgtgtgttgcaagcgaaagacagagcccgaaaagccgatctggctattgtagtggtgggtgagaactccatgcgttatatgtggaaagacaaaacttgcggtgagaatgtggaccgttatgaattgtcattggtaggtttgcaacaacagttggtagaggagatttatgctacgggagttcccactattgtcgtattggtcaacggtcgtccgttaggcactgagtggattgctgaaaatattcctgcattggttgaggcctgggagcccggttcatttggcggacaggctgttgcggaaattttatacgggaaagtgaaccctgaagcaaagcttcccatcactattccccgttctgccggtcaggttcagacttattataaccacaagcaaacgagcaaatggttcccgtacggtacgggaaaaagtactaatctgtttgagtttggatatggattgaattatgcttcttttgaattcagccctgtgaagttatctgccaggtcgatgaatgaacaggataccttgcgtgcttctgttgaagtccggaatataggtgaaagagccggaacggaagtggtacagatgtatatacgcgattgctacagttcggtagtacgtccattgaaagaactcaaaggctttcataaaattactttacaacccggagaaagccagacagtcactttttatatcaccgccaaagaacttagtttttacgatatcgatatgaactatggtgtggaaaaaggtgagttcgaggttatgatcgggaattcttcccgtgatattgacctgcaaagggagttgtttaccataaaatgatgaatagtgcacctttttagatgaattgggggagtagcaagtccctctcccccatatctttgccgaaaataaaaacaataaataagtctatgagaacacctactgaaaaactgattataataagtatcgcttgttttctaagtgcctttgtatctcaaccggtactggcgcaaaagtctaaaacgatctatcataaagactggatagatctgaataaaaacgggaagaaagacatttacgaaactccgacagctcctatcgaagctcgcattgccgatttgctttcgcagatgaccgttgaggagaaaacctgtcaattagctaccttatatggatataagagagtcgctaaagacgaattgcccattcctgcctggaaacaggagttatggaaagatggtattgccaatatcgacgaacatctcaatgggcttgtaaagactcaatattcgtaccctttcagtaagcatgctgaagccattaatacagtacaacgttggtttattgaagaaacacgccttggcattcctgttgatttcagcaacgaggggattcatggactcaatcacgaccgcgcgactccgcttcctgctcctattgccatcggttccacctggaatgctgctcttgtcagacaggcgggagaaattgtaggccgtgaagctaaagctttgggttacaccaatgtatatgctcctattctggacttggcacgcgatccgcgctgggggcgcgtacttgaatgttacggtgaagaaccttttcatgtaaccacattgggcaaggaaatggtggcaggtatccagtcgcagggagttgctgcaacgttgaagcattttgctgtgtacagtgtccccaaaggtgggcgtgatgggcatgcacgtaccgacccgcatgtcgctccccgcgaaatgcatcagttgcatctttatccttataggaagattatacgtgaggttcatccgatgggagtgatgagcagttataatgattgggacggtattcccgtatccggcagttattatttcctgactgagttgctgagagaaaaatatggtttcgacggttatgtagtttccgacagtgaagcagttgagtttgtctatagcaagcaccgtgtggctcaggatatgaaaggagcagtgaagcaggtggtagaagcaggactcaacgtgaaaacgaattttacgcaaccttccgatttcgtattgcccttgcgtgaactggttgcagaaggaagtgtatccatgcagacactggatcggaatgtagcagatgtactgcgggttaaattccgcttagggctttttgacagtccgtatgtcacggatacgaaagcagctgacaagattgtcgcttcgtctgataccaaggagtttgagaaacagatgggtagagaatcactggtgctattgaaaaatgaagccaatctcttgcctctccaattgagtaatcttcggaatattttggttacgggtcctttagctacggatactaccgcttacgttagtcgctatgggccgcagaatttgcaggtaacccacgtgttgcagggtgtcagagattacgttggacaggcggcaactgtacattatgccaaaggatgcgaagtagtggatgccacttggccggaaagtgaaatcattccgactcctttgacggaggaagaacgcctggaaattcaggaagctgtggagaaagctcgccggagtgatgtggtaattgccgtattgggtgaggacgaacaccgggtaggtgaaagtaaatcgcgtacaggattggctttgcccggacgccagctgcaactcttgcaggctttgtacgaaaccgggaaacctattgttctggtgcttatcaacggacagccgcttaccattaattgggagaatcgctacatacctgctattcttgaagcctggttcccaaattccatcggtgggcagacgatagcggaaactcttttcggagaatataatcccggaggaaagttgccggtaacgtttcctaagactttgggacagattgagctgaactttcccttcaagccgggttcacatgccggacaaccgggtgacggtcctaacggctatggtaaaacagcggtagtaggttctctttatcctttcggatatggattgagttataccactttcgaatataagaatttgcatattacccctgacaaacagggagtgcaggggaagatagaaatatctatggatctgacaaataccggacagcgggcgggtgatgaagtagtgcagttgtatgtgcgtgataagttaagttccgtgattacctatgattctcagttgagaggtttccaacgggttaccttgcaaccgggggaaaccaggcgtattcatttcactcttcttcccgaggatctggaaatgcttgacaaagatatgcactggatcgtagaacccggtgagtttgaagtcctgattggtagcagttccgaagatatccgactgaaaggaaagtttgaaatgatgcaaccctgaaaactgtataatgaacgttcaatacaataaattaatcccattatttatcttaaatttataaccatgagagacaatgaaactgattaaaagagttcgcttgaacttatgagtagagaaactaatactgaaaatttgattaatacacaattaattatgaatacactttttacatttgtgaagagaacttatgttcatcttcttatgtgtgccgtgttggtcatcgttgcgatgccactctctgcacagaacatttcatccggaacagccaaccagcagatcaccggtctggtgaccgacgataaaggcgaaccactgattggcgcgaatgtagtactgaaaggatcctcgtctataggtgtgattacggatcttgacggtaaattctcattgaatgcacctttgcaaggaaccttacagatttcttacatcggctttcatgcacaagagattgcgataaacggaaagaatcatttcactgtaaagttgcaggaagattcaaatactcttgatgatgtggttgttgtgggatatggagtgatgaaaaagagtgatgtgatcagctctgtaaccacgataaagacagataaaatgacgaaagccgccaccctggatattggtgaaatgcttcgcggacgagctgccggcttgaaaattacaacctcagaaaatgccggccccggtggtagttcgaatatacagatacgtggtacaaactctatttcgggaggaactactcctattgttgtagctgacggagtggtgatcggttccattaatgatgtgaatccgaacgatattgcatctgtggaaattctgaaggatgctgccgctcaggctatctatggtgcacgtgcagcaaatggtgtcatattgcttaccaccaaaagaggagaagcgggaaaagctcgtgtaagttatcaggggtattatggtatccaaaacgtcgaccgtaactttgatgtttacacgcctgaagaatttatacagtataaacgtgaggcttaccgtaccaccaataataaccagtatggtgccgattctgatgtattcagccaattagaactcgaatctatccagaatggacagttcattgactggcagaaagagttgatgcgtaccggtactattcagaatcatgacctcacggtgaccggaggaggtgagaaaacaaaggtatttgtgagtggtaactttatgaagcaaaccggtgtggtgcctgctacggattttataaaggggcagcttcgctttaatctcgatcaggagattacccgttggcttaaagtcggtttaaataccagcctgagcatttcgaccaagaatgatccgggggtagccggcctgttgcgtgatgctgtaacttgttcacctttaggctcggtttatgatgctgaaggtaaccttaatatgcatcccaccggattgcaggagaattggaatccgctgattgacttgcaggaaaaaacatcgaccactaagagccgtaatgacttggtgaatcttttctttgacttcaagatttttaaaggactgacctatcgattgaatgtgagccgtcgtagctggaatgcaaaggtagaaacctatagtacagccaattcgaaggcaggaagttacacaggtatgggaagtggtactattaagaaccaggatgagaatgagtggacgcttgataacatcctttcgtatgataatcagtttggcaaacatcacgtatccggtacgttgattcagagctggaatgagcgtaaccaacattccaatcagatggatggatcgctgattccgaatgacttattgggtgtctatggcattgaagcggctgggaaagtaatacctactttaagtgcgtctcaacgccgtcttgtgtctaccgctctgcgtatgcaatatgattttgcttcgaaatactatgtaaccataagcggacgtcgtgacggttcatctgtgttcggtgctaaaaacaaatgggctgtttttcctgccatggcattgggatggaatgtgtatcaggaagagtttatgcaaaactttgagcaacttacgaacttgaagttacgtggtagctatggtagtgtaggaaatgaagctatacagccttatggtagtattgcatctgccgaccagtgggattattacaccacgaagaaactgacaggatatacgccgggagctgttctttcgaatcctaagttgaagtgggagacttctacaaccttgaacctggctgtggactttggattcttcaataatcgtttgtccggtactgtggaatggtataatactcgtacgaaggatttgctgatagaccggtctatcagttcggttaccggatattctaccatcaaggacaatatcggagagattcagaacagaggtcttgaaatacagttggaaggtgttgtggtaaagagtcaggattgggatgtacaattgggaatgacttttgcacgcaatcgcaataaaattataaaactgttcggtgacttggatggtgacggcaaagaagatgattatcctattaataattggtatatcgggcagcctatcaatgtatccaaaatatacgaagtagccggtatctggcaggaagatgagattgatgagattcctaattcagcacaacccaatgctcaacccggagatattaaaattgtagaccgcacgggcgatggcaagctggacgatgatgacaaaatactggtttcacaattccctaagtggaatggttctttcaatgcatcggtaagatataagaatgttgacttctccatggatatttatactgtacagggaataaccaaatacaatccgttcctggcagattataattatggtggtaatatgcgtgcagtgttcaacggtgtgaaggtgaattactggacaccggaaaatcctaccggtaacttcccgcggcccacaaccaatggtgccctcgaaatgggaagtatagcccgtcaggatgcctcttatgtgcgtttacagaatataacgataggatataccttgccgaagacatggcttgcaaaagtacacttgagcaatgtcaggttctactttaccggacaaaacctgttaacattgacagattatgagtcgtacagtcccgaacagcccgctgacaagtatcccgaagcccgtacgttgactttcggcttgcagcttggtttctgatcggaaggcagtcagagatataatttcatacattcaacattttaatgatataaccataatgaaaaattatatattatttcttatcatcggattactggtagtcaatacctcttgtgattcctggctggaagaaacacagttcgacaagattaatagttcaacgctctatgagagtgaagaaggattggaaatcggtctgaatggactatatggcctctctcgccgctttttccgttttaatgattcggatgcacgcggagcttactggttttattgtgctaccgacctggctatggtgcgtacgtggaatgaagcggaaatgtatcgttccaatatgcgtgcaaatgctatgccggctgagatgtggaaccgtccctatcagatgattgatcgtgcttccgccattattgatgccgcacccggtattagtatgcaaactgaaacccgtgagcgaatcgtttcggaagcccgtgtaattcgtgcttgggcgtacctcaggctgatttctacttacgacaatatcttgttggatagcataccgacaactccggacaatgcgtttgacgaagtagagtataaaccggctagccagaaagatgtatatgcctttattgaccgcgatctcgattatgccatcaaacacttgcaatataaagtagatccgggaattatcggattgggcttggctcgtcagttgcgtgctgagtcggctatgtggcaggaagattacactacggcagcagcgcaggctgatgcgataattacaggcggacaccataaactggtaggtatcagcgaaatattcggtaataatgtaaaccatagcgagagtctgatggcgtggcagttcgatgaagtatctggaggtagccatacactggctggaggtgatggtcatgtgttgggagcttgtttccaagcccgtttctatgagatcaccattccgggagatcctgtagcgcctatcattgaggaagctaactatggaggaaatgcttacgggtggacgtatccgaatgagtatctccgttcattgtatgacaaggataaagataagcgtttacaattctatttctatccggatacgctgtacggaaacaatccagcttctgcctattatgaaaagaaattaccgggtgatcccccgtattctactcagctgcgccagtatacatggagcttgatgaagtatcgggatctgagtaaaccggccaaacgcgccttgtcttacaagccgtttatagcttatcgtctggcggatacttatattttgggtgccgaagcacattggagaaaaggaaatacggaaaaggcactggaatatctcaatgctatacgtttgcgtgccggacttgaagaggctactactattgatcttcaggctatcatggatgaatatgcgcgtgagttgtgctttgaaggcaaacgttggttcttcctcaagcgtatcggcaagttggtggaacaggtgaataaataccatcgcttcggtagtacaaccagtagtattcagggtaccacaatgaaagattatatggtgcgttggccgatcccgcaggcacaaatagatgcaatgggaactttcccacagaatccgcaatattaaatgagtatgaaaatagtaaccacactcttgttatctctttttgcttcttcagtgctgtttgcccagtctggtaaaacagtccaggtacagacacgtgccaacagcactgtggagaactggacaccttacgaggcgcatactgtggataacctgaaaggattcaaaaagaaaaaggagccagctctgtctgtgttcggagggtataagacgaaccgccaggaagcaaccggctttttccgtacagagaagatcaatgggcgatggtggattattgatcccgaagggtattcgttccatcaccgggcagtagtggcatttgggcctggaacctcgaagaagcaacagtctgcatttcaggagaaattcggtacgcgtgcccagtgggtgaaggcagagacggaaatgttgcgttcgtatggatttaatggtgccggagcctggtcggcagtggaagatatccgtaccagtcaagctccattggtctatacgctgattgtcaaccctatggggaactataagcatgaacatgtgaagaaatatggaggtacctataaggtggccggctggcaggggtatcgattcaatctgcctatggtattcgatgatgagtttgacaaatatgtagagcaggctcttgctccgttggcatggtataaagatgatccttgcctgttaggctattttacagacaatgaattgccttggtatactgatgctttggaccgccatcttaactttctggctaaagatgaaccgggatacctggcagcacggaaatggttggatgaacgaaaaggcaaggaagcaaccgtggcggatattaccgaggaagaccgtcttgcattctccgccttcttcttcgagacgtatatgcagaaagtgacttcggtgttgcgtcgtatagatcctaatcacatgtatctcggctgccggtttaatcaggataagaatcaggaacttaccaatccggctatctttaaggtagcaggtaagtatatggatattatttctataaatcattaccgccagtggcagccggaacaggagcggatgaataactggggagaatggtcgggtaaaccttttctgattaccgaatggtatgtgaaaggagaagattccggtttgcccaatgcaaccggtgcgggatggaatgtgccgactcaggatgaccggggaattttttacgaaaacttctgtttacagttgctccgcaatccatactcggtagggtggcattggttcaggtatcaggataatgatccggaggatttgacaacagacccttccaacagggattccaacaaaggaattgtagacagcgaatattctccctggttacctttattgcggcgaatggagaaagtaaacaagcaggcttacacactcactcgttactttgattcgcagaagtaaatagttggattttgataggtattcatataagaaccgtttcggctttaggacaagttaaagttgaaacggttctattcaataaatcatttttatctatggtgtttattacgaataaaagcgtttgcttatacagaaatacaggagtattctttgtattaatgatgtgttggttggcatgtagtgcccagtcgggaaataactctatgtacgactatagtgcgaaggtcgattctgtactcagcctgatgacactggatgagaaaatcgggcagttaaatcaatataccggtaattggcaggcaacaggaccggtggtggaggattctactaaaatagagcagatcaaggcgggcagagtcggagctatgctcaatatcaaaggggtgaaatatacgcgtgagatgcagaattatgcgatgcagtcccgccttcgcattccattattattcgggcaggatgtgattcatggtctgcgtaccatctatcccattcctttaggtgaagcggcaagttttgatctggatttgatggaaagaacagcagccggtgctgcggaggaagcttctgcacaaggtattcactggacttttgctccgatggtagatataacccgtgatgcacgctgggggcgtgttatggaaggagcgggcgaagatacctggtatggtagcagagtggccgaagcacgggtaaggggttttcagggagatgatttggcggatactcatacggtaatggcttgtgccaagcattttgcggcttacggagcggccattgcaggtaaggactacaatacagtagacatttccgacctgacgctacacgatacttatctgcctcctttccgggcggcggcaaatgccggtgtggctacttttatgaatagctttaatgacataaacggtattccggctacgggaaatgcatatatacagcgcgatatccttaaagaaggatgggctttcagcgggtttattgtttccgattggggatcggtcaaagaaatggttgcccatggatatgcatccgatctgaaggcatcggctgagattgctattcatgccggatgtgatatggatatggagtcgagagcttatcataagcacttgaaagagttggtggaagagggtgttgtggacattaaatatgttgatgaagccgtaaagcgtattttgctgaaaaagtttcaactcggactttttgatgatccgtaccgttattgtgacgaagagcgggaaaagaaaatcgtattgagcacccgtctcagggatttgtcccgggaatctggaagaaagtccgttgtcctattgaagaatgagaagcaagcacttcctttatctccgtcgtgtagaagaattgcattgataggagctttggccaattctcaaaaggatatgatgggcttttgggcgaatgaaggtgtagagaaagaagtcgtgaccgtgtatgagggtttgaaaagacgttttcccaatgtaacggtcaattatgccgatggatatgatttggaaacaaatgatttacggctttctgaggcccgtgcggctgccaatcgcgccgatgttatagtagtggctgttggcgaaagatttaatcagagtggagaagcaaagtcgagggctgatattaccgtcaatgccaatcagcaattgctggtgaaggagttgaagaagacgggcaagacggttattgttttactgatgggcggtaggccaatgatttttaatgatatggagcctcatgccgatgcaattcttctgacttggtggttggggaccgaaagcgggaacgccatagctgatatcatctcgggtgattataatccttccggtaaactgcctatgacttttcctgcacatgtggggcagattcctgtctattataattataaaagtaccggaaggccggaaagtaaaacagttgcctattcttgccggtatcaggatattgattttgaacctgcttatccgtttggctacgggttgagttacactacatttcagttgtcggagcctaagacttccgccaatgtatatacaatggaggatacgatccgggtgtctgcgaagttgaaaaataccggggtatatagaggtaaggagacagtacagctttatatccgtgacttggttgcctccgtaacacgtcctgttaaggaactaaagggatttcagcaaatagaattaaatccgggtgaagaaaaagaggtgacgtttattctttcatcggcagatcttagtttcatgaacaggaacttaaaatatatcacggagcctggtaaatttgagataatgatagggactaattcgaaagaggtgaagaagacaattatatcattgaagtgaaagttacttcccagacttacataagaagaactcccctgccggtttcccggtagaggagttcttgtgatattaatcaaatgtagaaagggctgattagtctttcagttttgcgatgatgaaatcgcggttcagacgggcgatgttgctgatagagatgttcttcggacattcggcttcgcaagcacgagtattggtacagttaccaaatccgagttcatccatcttgctcaacatagcttttgcgcgacgcaatgcttccggtttaccctgcggcagcaagttcaactggctaacttttgcggaaacgaacaacatggcagaaccattcttacaagcagctacacaagcaccgcaaccgatacaagctgctgcatccatagcttcgtcagcgatttgcttcggaatcaggatagcattggcatcttgaggagagcctgtgcgtacactaacgtaaccaccggcttgcataatcttgtcgtaagccgtacggtctaccatcaagtccttgatgaccgggaaaccggcagaacgccaaggttcaacagtgatagtgtcaccatcgttgaaacgacgcatatagatctgacaggtggtagcacctgttgcaggaccgtgaggatgtccgttgatgtagagcgaacacataccgcagataccttcgcggcagtcatgatcgaatacaaccggttctttaccttcagaaatcagttgttcattcaagatatccagcatttcgaggaatgaagtgtcaccggggatatctttcatttggtatgtttcaaaagcgccttttgcctttgggcctttctggcgccatactttcagtgtgaaacttatatttttatccattgtctttgatttttaagttgacgagttgacaaggcttcagttaacaagggagaatgttccgcttattaataagtgatgacaacatacgtatgatttcattgtttaagctgttaagttcttcaaagctttgagtagataagtaatgtatgtcattacaaataatgagttgggtctctaactcagaagctgaacctaaagatatatataaaaactgaataagctctttatcatgccctcttccatatccttctgctatattcgaaggtatagaaacagcagctctgcgcatttgcgaagtaatgccgtagatttcctctttaggaaatacttgagttatttgatataagtccttaacaagtttcatactcttttgccaaacaattaaatctttatgatttctcatgccttgttcccttgttaactcgtcccctggttaactaattatgatttatagttacgagtctgtaccttgattgcttcgtaaaccagcggttctttcagcaactcaggagctttttcatcggaaccttgatattcccagcaagcaacgtagaagaagttttcatcgtcacgttttgcttcgccttcttcagtctggtattcttcacggaagtgaccaccgcagctttcgttacggttcagagcatcgtaagcaaccaattcgcccatgataatgaagtcgtacagacggatagctttatccaactctacgttcatgccttccttatctcccgggatgaacagatctttttcgaattccttacggatttctttcagtttggcaataccggtcttcagaccttctgctgtacggcccatacctacatattcccacattacgtgacccagttccttgtggatagaatctacagacttcttacccttgatattcatcatccagtcaatcttgtcctggatagctttctcggctgctgcaaattcaggcaggtcggtagagaagcggggaactgtaatctggtcggccagatagttctgaatagtgtaaggcaatacaaagtaaccgtcagccagaccctgcatcaatgcggaagcaccgaggcggtttgcaccgtggtcagagaagttacattcaccgatagcgaacagacccttgatagaagtcatcagttcatagtcaacccagataccgcccattgtatagtggatagccggatagatcatcatcggattataatatttcacaccggcaatttcttttgccagttcacctggattaacgtcagtgatttcctcgtacatatcgaagaggttaccatagcgttgaagaacgatatcgatacctaaacggctgatagcctcagagaagtcgaggaatactgccaggcctgtattgttcacaccgaaacctgcatcgcaacgttctttagctgcacggctggcaacgtcacgcggaaccaggttaccgaatgccggatagcggcgttccaagtagtagtcgcggtcttcttcaggaatatcacttcccttgatttcacccttctggagcttcacggcgtcttctttcttcttcggaacccagatgcgaccgtcattacgcagagactctgacatcaaagtcagcttagactgcttgtcaccgtgaacgggaatacaagtggggtgaatctgtaccatagccggattggccatccaggcacccttgcgatagcaagaaacggcggctgtacagttacaagtcattgcattggtagacaggaagtatgcgtttccgtagccaccggtagcgattactactgcgtgtgcagcaaaacgttccagtttaccggttacgaggtttttagcgatgataccgcgggcacgtccgtcaacgaggacaacgtcctgcatttcgtaacgagtgtataattttacggtacctacgtttacctggcggctcagtgcagagtaagcacccagcaacaactgctgtccggtttggccgcgggcatagaacgtacgtgatacctgagcaccaccgaaagaacggttatccagcaaaccgccgtattcgcgggcgaagggaacaccttgtgccacacattggtcgataatgctgttggaaacctcagccaaacggtaaacgttagcttcgcgggcacggtagtcaccgccctttactgtatcgtagaacaaacggtaaacagagtcaccgtcgttttggtaattctttgcagcgttgataccgccctgtgctgcgatggagtgtgcacggcgcggagagtcttgaatacagaagttgaatactctgaaacccatttcaccgagtgaagcggcagcagaagcacctgccaagcccgtacctactacgatgatatccaagcgacgcttgttagcagggttaactaatttctggtgagctttatagttggtccatttctcagccaccggtccttccggaatttttgaatctatcttagtcataatgtaatttacaatttagttatttacaatttacaatttagcaagcgccgcacaatgattttgcgaagaatacgacaactaccaaggcgaaacatacaacgacgatagtagagtaaatgttggagatgcatttccaacggttaatccataccttgttgttccaacccagggattgcatagaactccagaaaccgtgagtcaggtggaaccacagtgcgccgagccaaatgagataaagcactacgtataccggattgctgaatgtgttctgaatgtgataaacaccgttagcggcataagccagtgtaagcgtgtcagcatgcatacccatgttgtgcatcaactcaggaagctgcatttttgcccagaagtttaccaggtgcagacccagacctacgattacgataagacccaatacgagcatgttctgagaagcccattctacagttttgggtttatcaactacggcataacgttcagtaccgcgtgctttgcggttctgcattgtcagccagaaagcgtagatgatgtgaataatgaaaagggcggccaaacctaccgtagccaccaaggcataccagtttgcccccaggaactcacaaaccatgttgtatccctctgccgagattaatgcaaccaggttcatcgccatgtgaaacgtcagaaacaggacaagggcgataccggtaatgctcatcaccactttccttcctacagatgaattacttaaccacataaatgattgaatttaaattatttaatagttagaaaatttgcttttacttagggtcttacactaatttcccgcaaaaatagaagaaatacattgattaaacaaggaattaaagaaataattccgtaattcagggaatagatagaagttgacaagtgagtcagggaacaggttgacaagggaagattactcttactcgtcaccctgttccctggctgggtcgtcatttttttcttttataatggtgattttctctccgctggcagcacgttttcgcaaggagcgaggggtgtctccaaaggagtccttgcagaaatgagcgaagtgcgacagggagtcgaaaccataacgtgaactgatcacggagatacgttgtttggtgaattgcagatcgttcagaataccttcacgcttcttgtccagtatccattcgtacaccggaacattatacatatttttaaacaaacgacggaatgtagtggttgtatatccacctaaatgggcgaattcttccacattcttcaccttgtcgtagttctgcataatgaaataatggaaactttccgtataagtactgataggatagaagaacgtacttatctggcgcaggggataatagcaggttagtatgtaaaccagttcctgacgcttgatgtcgagatatttcccgcatgcggaaggctgttctttaaaatagtcggcgatatcatgcagcaaccgctccagtttggtattggctatcagcggcgtgtaggtcagcggagcctcagaacgttcgaggatttccttgtaacggtcttcacatataagtggaagttccgtaaaccaataggcgatatattccacctcggtcagtgctaacaactccatttttgaaccgatggcttgcagtacacattgtctgctctggagcgtagtgcccgggtattcgttactatttatcaacaattctccctttaacataaagatcatgcagttctgggtacacttctccgctgagaaatgctgcccctggggatattggcggtataccaatgtcccgtctgagatttttgggcatagagtacaatctacttgccgtgtgcaaagagtgtcttttgtcatgaaatataagacgaattactaaaattatggcaacaaagatagaatttttttgtgaatactctaacaaaatcgcctatctttgcagcaaactataagaaagactacatgaaacggactattttttttgtattttttgcatcattacttgtattcaatatttctgcccagaactgggacattaatactttgcataaaataaatagttgggatggtaagttcattcgtaattataataaaataatttctcgtactgaaccttatattgccgtgggggttcccgtggcgatggcgttggctgcctgggtgaaaaaagaccgcgaattattgaaggatgctgtgtatgtaggtaccagtgttgccggtgcttttgttgtgacttatggcatgaagtatcttatagatcgtgaacgcccgttcgaccgctatcccgaccgggttcatgcttatagtcatgaaaccagtccttcttttccttccggacatacggcaactgcttttgcattggcaacttcactttgtgtgaagtatccgaaatggtatgtaatcgctccatctgccttatgggcatgttctgtcggggtatcccgtatgaatgagggcgtgcactatccatccgatgtgctggcgggcgcagctatcggagccggatgtgctgtagtaaatatctatgtgaaccgttggctgaataagtggttgttcggcaattaagaattacattgtatcggatctatatattctgcgtattgcatctatatatcggacgtgttgcatctatatatccaatgcgttgcatctatatatccaagatgttggacatatagacgctgcaaatggtttattagagtggtagttttttctcgtaaatcttttcgttcaataactcaagggcttgttgcacgctgttgttcgtggtgtttatcacctgaaagtattcgttcatatcccacaggtcacgggctatcaaggctttcaactgcgtctttatcagaggcaatgatttgttgtactgctcctcgttgaactcaatcttttctttatcggcggcagcgcgtatgtctgcaagcatctgttcgtctatctcaaatttattgttgaaggtatcgaacttcttatatttctcttggagttctttccgatttttctcgatatacttggttgttgctttgatgacaacgcctttggcaaccagattacggtgataatcggtatattgggttgtatcgataggcacgaaatagtcgggcatgatgccaccgccaccatatacggtacgtttcaacttcttagtggagttcttcaatgaatcaggaaaatggatactgtcggcatgcatcatttctccacggttgaagcgatctaccagttccatattgtatttctcctggccgtcatctttactaaggcctttgccgtccagattggctgtatggtcgtacggtttctggatgcaacgtccggatggggtgtaataacgggcgatagtcaagcggatcatagagccatcgggcaattcgatgggacgttgtaccaaccctttaccaaaagtacggcgacctacaactacgcctctgtcccagtcctgtatggcaccggttacgatttcacttgctgaagcggagtattcgtctaccaacacaatgaggcgtccgtttttgaagttgcctgtgcctttggcatagaaattactacgctgagaggttcttccttcggtatatacaatcagctctttttgttgcaggaactcgttggcaagatcaattgctgcattcaaatagccgccaccgttgccttgcaggtcaagtatcaggtctttcattccttgcttctgtagttctttgagggcggtggtaaattcttcggcggtagtggcaccaaagcggttgatacgaatataaccggtcttgggctgtatcatatacgaagcgtccaaacttagaatgggtattttatcccgttttacagtgaagtataagggatcgttcactccgcgacggacaatggttagttttacttctgagtctttcgggccgcgcaggcgtgtcattatatcttctgtggacatttttacaccggcaatagcgctgtcgttcactgccacgatacggtcacctgccagaataccaaccttttcagatggtccgttgctgacgggctgtataataagtaatgtatcttctatcatctggaactgcacgccgataccttcgaagttaccttgcaacggctcgttcattttcttcacttcctcagcatcattgtacgtggagtgcggatcgagctgggcgagcatacggataatagcttcttccaccagtttattttcgtctaccgagtctacatacagattggcgatggcaaattctgccatttgtaacttgcgggcagccaagttgcccatattctgcgcctgcatggaagccatggcaccgcatatacatattataaagataagaagtttcttcatcattcttttttgcttatcacttttcactaattcactaatcattaaatatccattccttcggggataaactggctgatatctttgccgaactgtagaagttcgcggacagtagtcgaactgatgcatgtcagttcgggttcggtaaagagcaagatggtttcaatacctgccagtttgcggttgatatcggcaatggtctcttcatactcgaaatctttcacggtacggataccgcgaacaataaactgcgcgtctacctgccgggcaaaatcaatcgtcaggcaatcataggagtagaccttgattcgtggctcgttccggtagaatttctgtattatctccacgcgcttctcaatagggaagtaggtgtttttattctcgttgataccaattccaataatgacttcatccataaaagtcagtgcgcgggtcactaccgatgaatgtccgatggtgaaaggatcgaatgttcccggaaagattgctcttctcatgatgccagatcttcttctataaccagattgttaataataaagttttgccgttccatggtatttttacccatgtagaattccaataattcttttacgaggtccgttttgcgtaaagtaacttgttccagacgcatatctttgccgatgaaatgccggaattcatcaggggagatctctcccagacctttaaaacgcgtaatctcaggattgggactcagttcggcaatggctttttgccgttcctcttccgtgtagcagtaaattgtctttttcttgttgcgcacgcggaacaacggagtttgcaggatatagacgtgccctttctttatcagatcggggaagaattgcaggaagaatgtgatgagcaacaaccggatgtgcataccgtccacatcagcatcggtagcggcaatcaccttgttgtaacgcaatccttcaatgccgtcttctatattcagggcagcttgtagcagattgaattcttcgttttcgtataccactttctttgtcagcccgaatgagttcaacggtttaccacgaagactgaatacagcctgcgtatttacgtcacggctctttgtgatggaaccgctggcagaatcaccctcagtgataaagatgcaggactcggattcttgttcctttcctttgccgtcattgaggtggtaacggcaatcgcgcaacttacggttgtgcaggttggctttctttgcgcgctcacgtgccagtttggtaacaccggcaatggctttacgttccttttcggagtcttgtatcttttgcagcatgacttccgcaaccaacggattcttgtggagaaagttatccacctctgttttgatgaagtcgcctacatacttattcacgcttacaccgccgggagacatggagggggaaccgagtttagtcttggtctgtccttcaaactggggttcttccacattgatggcaatggcggcaacaataccgttacggatgtcggcatattcctggtttttgttgtagaactccttgatggtgcgggcaatatgttctttaagcgcactttggtgtgttccaccctgtgtggtatgctggccgttgacaaaggaatagtattcctcgccgtattgattcgtatgcgtaaaggctatttcaatatcttctcctttcagatggatgatattgtaaaggccctgtgcggtcatattgtcgttcagcaaatcttccagtccatggcgtgaaataatgcgctggccgttgtatataatggaaagtcctgtattcaggtacgtgtagttacgcaacagcgtttccacgaaattagcctggaaggaatagttcaggaataacgtgctgtccggttcaaagaagatataagttccgctttcctcgttacagctttccgttacatcactctggagattacccttttcaaagatggcgatacggactttaccttcgcgataactgcgtacttcaaagcggctgctaagtgcattcacagctttgatacctacgccgttcagtccgacacttttcttgaaagctttactgtcgtacttaccgccggtattgagtttactcaccgcttcaatcagctttccttgcggaataccacgaccatagtcgcgcacactgacacggagattatcctcaatgttaatctcgatccgtctaccagcacccattttgaactcatcgatgctgttgtccattacctcttttagcaatacatagataccgtcgtcgttctgcgtaccgtcgcccaaacgaccgatatacatacccgaacggacacggatgtgctccatgtcgtccaaatgacgaatgttgtcttccgtatattctacattgccttcgggcatcagtccgttgatttcttccataaactcttatttagttgacgaggtctgcagttgacaagttgacgagggaaagagtctgctttataatggtgcaaatatagtgcaaccccttgtttccttgttaacttgtctccttgtcccctttttatttaatttctttaataaacgccctgcgccgtttatgttgtttggtttcaaagtattcccattgggcttgtactttgccattcatttcaagttcagggttgctttctgcaaatataaaacctaatttctgataaaccggaattaaatcggaaaataacaatgcgttaacacctttgttctggtactccggcttcacggcaacaagcaataaatccaacattttggcacgccgtttcatgaacagtgctttcagcagatagtaccatccgaagggtaataaccgtccatgagctttctgtagagcttcggacagggatggcatggatatgcctacgcaaataagttggtcgtcggcatctgtgataagcgtcaccatgcggaggtctacgatggggagatacattttcacgtactggtcaatctgccgttgggacagagcggaataaccgaacaggggcttataagcttcgttcatcaactcaaagatggcctgtccatagtcgcgggcaatcttctttgcagatgtatattttttaatcttgagattatatttacgctggataagatcggagatgcgtttgtgcttgtccggtatggcatccggaatgtagatctggtattccacccagtcagcttccttctcaaaacccatacgctccatgtgttgcggatagtaaggatagttgtaaatggttgccatggtgctgagttgatcgaagccttcgaccagcatgccttccgcatcgaagtctgtgaagcccaacgggccttgtatgtgagtcattccacgttcttttccccattcttctaccgtgtggatcaaggcatcggatacttccgggttatcaatgaaatcaatccagccgaaacggacattctttttatcccaggttttattagccttgtggttgattatggcagctacgcggcccactattttattgtcttggtaagccaggaaatactctgcttcacagaattcaaacgccgcattcttctttttattgaaagtgttgagcatgtcgtcgtagagatcgggaacggagtaggggttgcctttgtatagccggtaattgaagcggatgaaccgtttcaattctttcattgtggaaacttttttgattgttattgccataattttatgtctaatgaagtggcaaagatacatgataatctttaaaataccacgtggcagagataaaaactaatctatttctgtatgcttttccgatactgtaaaggtgtcatacccgtatttttgaagaaagcacgtcggaacgtggaagtggagttaaatccggaacgttcggctatttcgtctatattcatggtgtaaggataggtagccagtaattgcttgccggttttctcaatgcggagattgtttatatagtcgtagaaagtgatattcagcttattgttgaaataggaggataagtaggtgcggtttgttccgatggcattggctacgtcactgatagtaagcttggggttaaggtagagttgttgctcttccattactttgtgcagtatttcctgaaaggcgtaataagaaccgttttcttgttcttcttcaacctcttctttctcttctatgttttttttagacagcaggttgcctttcaggttgtttggcatggagatgctgatctgataagctgaatagtggacaatgacagaccataagagaactgaggatatgtaataaatagtatctccccaacctgtaatatttatgctggtatatacccatgtcaccaagcagatggcgagaataaatgtggctttcttcaaccatgccacatcgatatgttccgaataagagtaattattgcgtatatagcgttgatatcggcgagcggcaaaagttactataagtacaataattgcactatagatcagtataaatccgaaataaaaaggaaatataggggcataaaaggtgcacaaataggcaattgtaaatgcaagatagggactgagaagtgaaaatactttcttccagttgagccatccgggcgctgttaattccagaagatagaaggagcaggcggcaactgcccatccgtcaatgaatagcagggagttgaccaatcgctcggttttcagtgaagggaaatagagtaatatatctttgaactccagtaatgcccagaaagcaagggtcagccccagtattctctgaatgcgtgagcgtggcctatgtgtgagcaaacggaaactgacatatccgaaaaacatgaatgcagctccgttcatgaagtatgatatattgatgccttccattaaacgttgtaaatgagtacggtggtgtatgctatataacaaagtatcagtatgctgccctctatgcgggtaatggtgcgtttggcgaagaacaatccgaatatccatagcagtatgctggagcctacaagtaccaatagatccatattcgtgatacccgtcaggtgcaacggtgtgatggaagcgctgcatcccagtacgaagaagatgttgaacaggttactgccaatcacgtttccgatagcaatttccggattcttctttaaggcggcgacaatggaggttgcaagttcgggcagagatgtgccgcctgctaccagagtcagtccgatgacggattcacttactcccagattgcgtgcaatgccgctggcgccatctacgaagaaattaccgccggcaatcagtgccaccagcccacctattatatatagtatggatcgccacatgggaagttgtttgatttcctcttctgtctctccctctttcttcccttgaaaagcgatggcaaaggtatatccgaggaaaatgatgaaaaaacagagcagcaacagtccgtctgtagtgttgattatattttcagaactatgatccagaaagacatcattcgcgcaaatcagcaatactatggaggataggatacaaagcgggatttccttgcgcagtgtatttctggaaataacaattggagcgaagagtgccgtacagcctacaatcatcagtgtattgaagatattgctgcctacaacgtttccgatggcgatgtccgcactgcctttcagagccgaagagacgctgaccgtcagttcgggagcggaagttccgaaagctacgatggtaaggccgataacaatggaaggaatgcggaagcgcttggcgatggatgcggctccgtctgtgagtccgttggcacctaaaaggatgaggagaagacctccgagaagagaaagaatatccatgagaattctgttttttgtgcaaatataattaattcctttcatgaaaagcgaaaaacattccgtatgtttggcacgttaattaatttgttgtttctaaataacatgattaagggcttttatatgaagggaatacgtgcgttgtgtctttggttcttgctgttgcctgcgggcgttgcatctgcccagttggtagagaaggtattagatgtctttaatgacgatactttggggactgttgttgctcaaagggcagatacagactcgattcatctgctgaagatgaaagaggatttggaggttgcaaggttgaatgaagctaatctcaggatggagatagagcaaatgaggctgaagtatgatgcggcggactccctgaagctggcaaagcagcgattgcgtattgattcgctcaggcggatgacaacaggcgtgccggtggtggtggaaggcgatacgctatattacctgtttgccaagcgtggtggtcatactccgcagcaacgtgccgaaatgaatgcagcggcaataacggaactaggtaagcgatttaatctgcaaccggattcggtttacttagagagcagtgatattgttaccgatctgatgtacggtaataaggttctttcttcttttacggatcaggatggcctgtgggaaggttgttcgcgcgaccagttggcggctgccaaacgtaaggtaatcgtagacaagctgaaggtaatgaaggacgaacatagtctgtggcagcttggcaaacgtattctttatttcattcttgtaatcataggtcagtatctgctgtttaaactcaccacctggttgttcaataagctgaaagtacgtattcaacgattgaaggataccaaactgaaacctatctccattcaggaatatgaattgctggatacgcagaagcaggtgaatctgcttgtctttctggcaaatctgttgcgatatgccgtaatgctgctccagttgatattgacggtgccgttgcttttctccatatttccccaaacgaaagaccttgcttataagttattctcgtatatatgggaccctataaagagcatcttcctgggtatagtagaatatgttcccaacctgtttaccatctttgtgatatggcttgccgtgaagtatctggtgaggttggtgcattatcttgccagtgaaattcaatcggagcggctgaagataagtggcttctatgccgattgggctatgccaacgtttcacattgtgcgtttcctgctttatgcatttatgattgctatgatttatccctatctgccgggttccaagtcgggcgttttccaggggatatcggtctttgtcggcttgattgtttcgttgggttcgagtacggtgatcgggaatattattgcgggattggtaatcacctatatgcgtccctttaagttgggcgaccgcatcaagctgaatgatactacgggaaatgtaatagagaagactccgttggtgacgcgcatccgtacaccgaagaatgaggtggtgacgattccgaactctttcatcatgtcttcgcatacggtaaactttagtcagtcggcacgtgactacgggctgattatccattcggaagtgagtgtgggatatgatattccctggcggaagacacatcaacttctggttgaggctgctctgaatactcccggagtggtagatgatccgcgtccgtttatattggaaacgtctcttcaggattattacccggtctatcaggtgaatgcatatattaaagatgctaaccagttggcacaggtttattccgatttgcaccagaatatccaggatagatttaatgaagagggtatagaaattatgtctccacattatattgctacacgcgacgggagtgcgacgacgatacctaaggatgatctgcgaccgaaaaagtaagccttttccggtgcgggaatgagcgatcctcccggtaggattgaaactgattcccactacgagagaaggcatctcccactacgagtgaaggtacttcccaataggggtgaacgggtgttccactacgagtgaatgtagtggaacactaagtgctttatcgcacagatagttatccgtttgtaatgttgctaaagtcgtccgacagggctgcggatgataaagaaaatgaagtgtctttatcgtgcggctacaatttccgaataaggatagttgtctgtaacctgctgccagtcctttttcactaagtcgtaggcataaatcagtctgccgttccgataaccttcgaacaatacatagattttcatcgtctctgtatcttgggcgagcatggttactgaacgtgccgaattggggaatgtggcaaaaggctcatccaagctcattgttgtctgattccaaagacacagttctgtctggccattatcggctcttactacggcatatccaccggtacgcacatatttagtagttccggtatcttttccgctgattattgtccagaagggaatgagtgcggtagcctgtatcggatctccgatgtatattttcccgctattttgtttcagatccagtacaacgggggtgaagctgttgtttccgttatcggccgagagtagcagttggctgccgccgccttgtacaccggggtagcgtgtcagggatttgagccttatacctacgggcagtttgtagcggtagttcgaggtttgatccatgtttcgggtgtagggccaggagccggtggttgccaatatcacttcatcggtggatatttgccttacggctattatagagctttggccgttgcaaagggtcaatatgttttcaagtcccatatcttgccagaaatgcatggaaagatcgtagctgaatactttgcgcactccatctatcgtctgtattccgcagaggttctgactttccgggacattgactacacaggagaaatctttctggtcttctgccaattttactatgttcttagggctgccatctgtgaggtttacgtgctcaatgcagttatcataactcgtgtcggaatgagaatttacaatgccgtagagtttaaactctttgggtgcttcgccgttggttaccgaaatctcaccaagcgtcatgatctcaccggagcgacgcagacgtaccttggtagttgaggcaggataatgtcccggtaccaggaaggtgatacttgtagtggtctgttccagcatgacgggcgatactccaagagcatatccctgatagtttagggcgggttggtcggggagcggccaatagatttcgaacataatatcgtcaccgggttggataccttgtgctttaatcgtgactttatcaccagggttaaaactggtctgagcaggcattacaatgtcggttaccaggatgggttcgtctttgtcgtcgtttttaacgcatgcggcaattagtagacagagtagtagatagagagataacttcttcatagcgtttgtatatttgataggcacaaatatattgctttcctttgacatataaagctgtatctctttttttaacctgttggcgaatgaattcgttttcatgactatcgtcaatggaattaatttcgccaacaggtctttctcattttttccggcttatggtatgcagtatgttgccttttttatcaatcattcgcaatgtcagttcttttttgtccgcagatactacagagaagcccggttccggattacaaaagacggttccttctgtgggtttcactttgcgggcaagggaaccggctgagttgacaatgtagtcgatatcacttcccggcctgcgaatatgctggaagttgtggatatgtccgcagatgtacatgtctaccttgtgcttgcgaagtatcggatcgagacgtttctgcatatccagacgttcgctgtcatctttcgaagtttctgcatagatgggatggtgtccggctacgatgatccagtcttctttggcactggtcagtacagagtcgatccaagagagttgtttttgtaaatcctgtttgcacgcgtcgggataggtggcggagtcattgcggtatttgtccatcataggggcggtgtctatccagacgatgcggatagtggtacctttgtcttcaaatgcctttgtatagtagcgggcgggcatggtccagcggcgactgatgctggtgtagtccaataccgcctgtgtgttgccacggtactcatgattgccgagcacggggaaccagtcgatcatcagttccgggtgagagtagatgagctcatagtttgtcatccataacggatcattcacgctgcgtacgccttcgaaatgatgtatatctccggtggcaactacaaattcggggcctatttcttcggccatggttcccatcagctcggctatgggcttctggtcgtagtagccgttgcggccgagatcgttggctacataaaaattgaatttcttgtcgaatatggaatagtccgttatctgtgcgacagcccaattactgaggagaataactaaaaggagagagaatacttttttcattatgatattttttgattgttacttaagtggttagaaattgattttcacacctgcatttacctttataccgtagtgttcgctttgcatcgtgcgatcctttgtaccttgatagtagcgtaaaggttggttcagcaggttgttagcttcagcatagaaggtcgtttttaacttcttgccgaaagtatagctggcattggcatccatataattcacagcatcgtagtaacggtcatagaacttttccgaacccatttcatcgatgaatgcagatgcatagttataagagaggcggatactcaatcctgatttctcgaagaagagtgaagcattggctgtgtgctccggagatcccgggaggcgcaggccgctttcattctcgcgtccttcgaagttgaagttatctacccgggagtaagaataggtgtaagttccgtagaaaccgatgcacttcaaggacggggcaatgaaactgaagtcgcgttgataggctacttccacgcccagcagatcagcattgccggagttgcgcggctggctgaatttagtataggtggttccgttgtagctatagttgcgcaatgtctggtctacaatgaagtcgttaatcttcttgtagaagatgccggcactgacgagaccgatacttttgaaataatattcaccactcagatcgaagttataggagagtgtcggcttcaatcccggattaccgagggaaatctcgttgtcgctgcgcttaattgtaatgttgggcgccaaggcggagtacttggggcgtgcaatggtgttggtgaacgaagcgcgtaccttgaagtcatcgtttacatcatatttcaccaggacggagggaagtacattcaggtaactgtccgattcgtagggcgtgcgggttgttttctcttcatctgcatcgaattggctaccggaatatttcacatgtgtattttccagacgcaatccaagcatcagatcccacttcttgccgagtttctggtcgaaacgcagataaccggctgcgacagtttcttttgccttgaagttggtggcgagttcttcttgcacttgctctttttcgaacaggcttgcattattcagatcgagagatcccaaatattctttgcttacgaaactgcctgctttgtattgatttcccggaatgtatccgtcacgattctggtcgacggcagtagccagactggctttgtcgaaaccttcttcatccagcggggtatattcgtagaagtcaatttccttgtccttagtcttatgtactactttggcaccgaagcgcaggtggtttccgaattctcctttcgtaagcggcaggctgaagtcgagtttgaacttaaagtctttttcctgaatgtcttcttgttgttcggtcacttctttcagactgaaatcatcgttcagatacatggttgaaccttcttgcggagtaagcagtggtttacgttcgtcactcagatccatattgaatttttgttttttcagctgatagtcgatgtaacgttcgttgggacgttcttcgctggctttggcgtagttaacattccatcttgtatccagtttgccgaagagatgctcaccgccgagggtaaagtccatggtgcgttgacgttccagacgggcgttgcggttatcgggcgtgccgcctttggtctgtacacgcatggtacctttgttgttaatagaacagtattcgttgccattgtcatcctcttccaggttgatacctttcacggtgaggcggtaacggttttcccaatcattgcgattattgaagatacctttgaaggtgagtttgttgttttcgttaatatcccagtcgagggcggcggaataactttgacgctctcgggtgacgtagtattgacgaacctggtagtcggtgatgcagagttctccggtttctacatctttgtcccatacaaattcaacatcgtccgaaccggaaggcgagttctggtaagaagcggaaagcataactcccaatttgtcgttgaagaaacggtcaccataagtaaatcctaaatttaattgtgctttgtcgctaatccagttgtaaccggttccggcagtggcactgatgaaacgcttataaggagagttcttggtcactaaattaatggagccaccgatggcgtcggcatccatatccggagtaacgactttattcacttcgatcgtctgtatcatatccgcagggatcaggtcgagctgtacattacgtgtatcgccttcagcagaaggaactcggttgccgttgatggtgacggaactcatatccgcacttgttccacgtacttgtccgaaacgggcttcgccctggtcatactgtacgttgatacctgaaatacgtttcaaagcatctccaatgttagaatccggaaacttgcctacttggtcggcagaaaccacattcttgataccgaggctgtttttctgtgaattaatagcgcggcgttgtccctggaaagctccacctactaccacttccttaagttcgagtccttcgttcagtatgacatctttctccagggtacgtccttcgggaatcgttatttttaattccacaggtgagtagcctacataacttacttttacggtgtaagttcccggttccagattagggaaagtgtagaagccgttgacgtcactcgtcaccccggcatgtagcttttcaatgtaaacggaggcacccggaagggtttgctttgaagtgtcgatgatacgaccgcgtacagtgccttgttttactacgtttgttttctcatcagcttttatcagattgctgaccgctgtaaataagaataagagcgtaaatactctaaaaatgtgtttcatacttgttatgatacgttaatgaatttgccgcaaaagtagaaacattgcgtttcatactttttgcggcaaattgaagaaatggtaacaaatatgatacatttcggttacgggattgctgaaatagttttcatttggattgagcttagtttttagggttatatttcactacctcattcattgacagcctctgatttaagatgttctccaactttcttgttaaaagatattttaaaagaataggcatattcacaaggtttattttgcgggaaagatatctttaatccttcatcggtttgtttccaatcaatcttttcatcagatcctaagaggtttattctaactatcttggcatcggcaattgattctttatttaaagactttattaaggttccgttatcactccaatttagaataattgcataaaggtcattatctttagtagtgaaacgcatatcttgggcagtataagcgattgctgcattatcggaaaaagcgccttttgtggcttcagtatctccttctccgaacttcttccaacatcgtgtgccataaatagcttctccatttacttttagccatttaccaatagagagtaatactgctttttgttcatcagtgattgtgccgtcagcacggggaccgatattcaataatagattcccgtttttactaactatgtcaattaagtcatgtacaatttgctccgggcttttattttcttctccatcaatgtatgaccatgattttttacccacagaagtatcagtttgccaggggaattgcatcatttttccggattttcctctttctatatcccatacttgaacattagttggatatccatatttggtatttactactacatttttgccccaatccaaagcgttattgtaatagtaagccataaacttattgaaatatggcattagtaccggattgttaactgtccagtcgaaccaaatgagttttggctcatatttgttaattagttcataagtatgagtaagccattcacgagcaaaatcttcggtatatttttcattatcgtatcttcttccgtatagggagatggtggagtcttgtacatcggatggaaatttcattccaccattatagaaccaagcattttcggctctatgagtcgataatccaaaaatgagaccttctttttctatggcttctttcagtaaccctataatgtcttttttagggcccatatttacggcattccatttattaagtttactgttgtacatggaaaaaccatcgtgatgttcagccacgggtactatgtatttagctccagcttctttgaacagtttgacccattcctctgcattgaatttttcagctttgaacaaagggataaaatctttgtagccaaatttatcctgaggtccccacgtttcaatatggtgtttatatacatggtggtctttttgatacatattgcgtgaataccattcggtatcgtaagccggtacagagtaaggtccccaatgaatgaaaattccaaacttagcatcagcaaaccattccgggaactggtagttgtctgctatatttttccagtcaggatgaaaaacttctgttcccttaggtgaagcaaccgagtctatgttataagactctttgtttatggactgacatgaggctaatagagccagagtcaatgtagaatagataaactttttcattggtttcttttttttatttttaatcatatagatagaacattcgttccatcagtttccatttttcagcagaagtgctcttaggagcacattcttggaattctgatacatactcttcccattcagcttgtttgggtaaatgggacagtgtattcatagccgtttcccaatcaaaatcaagaggagtttctataatcatgaatacttggaagcctgatatgtatatttccatttctagaattccgacggagcggataccttttcttatttcaggccatgcttcttttttgctgtgtatcttacgatactctgcaataagtgccggattgtttttaaggtttaatgtctggcagtacctttttacaggtacagagtgttgttttgctgtgtatccttgattatatgtcataagtagtttattttttagttgttatcctgaaatcaatctttctaccttttcccgatattgtatctttaggggactgttgtttctgtaaaatcagaatagaaatagtcaatagcattttcttccggcagatagatagtccgccagcgtaaaacttttgtctggtcgcagtcttctatccgggtttctgtttctgctattggaatcttaattgtcttctccttacctgtgacatctgtataatacatttcacatttcaaggcattattggcaggccgccatgagatgacaatatcgtttccgtctgtgtatagtctatccatttttctgttcacaaggttaccttcatagaaatctccatatgcgtacccttcaataacagattcgatggaagagttacctttggcatcataagtggttattgagaactcatattgtccttcttccaggtcattaatcatcacttcaaacgggtcgatggtgttttctcgtacaacgtccagttccagtgatttatcttcttctccctgagactgccaacgtatcacacatttcttttgagttactccatatatgtatagtcctttgagtaaaattcgatttcttccggaagaagcggtcagtgaatcgacttttcctacatagatggtctctccttcattcagatatggctggatattttctaacatatcattgcaggatgaacatattccggcaattacacagagtataataattatatgtttcataaggtttcttttatttagtttcaactggttttccatagaaagtaacttccattaaatgaataaacttaactcctgtaaaggtgcttaatgctttaaaacggatgtaccgtactgccggagcatctgttgggaagatgaactcttcgcctgcactggcgtattctttgtcttcattggagatttgccctgcaggtaatcctgaaggtttgtaactttcacatgtagtcaataaggtccatccatcccaacttccgctttggtctggtttatcggcacgaccccaaacttcccattctttcatgttgccatgttgatataagaaagagtcatccaagcgttgccaatacagataacgacttaagtgagtggttactcctaaatcgaatgtaaaccagatgggcatcgtttggttgtcttgcggagagtgagccatatcccatccgtccccgtagttatgactgccattccatatcttgctcaaccagtgtccccatgcattcatcgggatatcattatccagtattacttcattgaatttccctttatccagttcatactcttcccatggtgttactgtagtgaatacggtatcggttgcattgtcccatctgtctctgacaattactccaaattttctctcttccggcttatatccgcgtgctgtgatattgatgtttttggcagcagtataattggtttgtactgtagtccattggttgagtgaatctggggtgattacttctatggcaaggtcacttgcagaaggattttgcatggatatagcaatacctccaaaagtttcgttcgtttccagagtgttgtatgcctcaatataagaaggtgtgagaggaataatattgtaggttataggttctccgatattttctttccggtctacagcataaaatgtgatctgtttctcttctgtgtctccgaaaccttctacctttaaactgctggaatatgcagaaacacggctctccatttctttaccggatgccagtttgtatttggcaacgatgtacatgaggtcttcattgtctggacttctgaagttgatgatggcaccgccagcagttggcgtataagacaatacttctacttttcccggggctatgccgtcatccggtccataaggtttatgcaggttatcttcctcacatcccattaataggaatgtgaataaactgattagtatataatatttcttcataataatgttctcctttcttattaccatcctggattttgctttaaattcggatttttaatgatatcatcatattttacaggccacaaataatccttttgactatatttcttttgtgcgatattacgaactacgtaataatcttctgtgttctcctgatctatgctccaacctcttacaaaggtgttattataggtacttttggcaagtttccaccggcgtagatcatgatatcgtataccttcaagagctaattcaatctgacgttctcttcgaataatttcccgcattccttctttggtggatggcttattaggattggtagaatatttcttccatgaatctataaccccttctaatccggaacgttctctgacgatatcaatattagtatagacctctgttggcacaaattctccgttgtcagtcgcttcattcagtgcttctgcatacatcagatacaaatcggccaagcgaacgatggggaacgggtactcttcgataacttcggatgtttgagaaattatgtttttatagtaaatcagtttttttgcataatatccggtgatagaatataaggcaagagatgattggccgctgacctgtcctttcttcgcttccagataatacagatcatccggattgtttttaccatgaccgtaccaacttgctccgtcaaatcctagagttccgtaaaaacggggttcacggttcagatttagcttggcggtctgatatccttccttaacaaaatatttgtcagcttcggtagcggttgccacttgataacgttcgctatagccattgctactaatccattctttatcttcttcaatgggtacaccattgctggaatagaacatttctgctatgtcgagggtaggagcatacattcctctgcatgtatattctttctcaatctggtaggcagctaatcttggttggcaatgacactgtagatcacgggtatatgatttgccgcatccccatacaagttctctgttgaaacgttctgttacagcttgtcttacattcatggagtacatcagcccatccggtagatttgttaatgattcttctttgaaattataaagcccatgccctgcttctatagcagttttgagtgcctcttcgcaagcgtccgcagcaagtttccatttgttggtactatattcctgaggaaaataaggttctccatcccagtctttgaaattggcataatctgtatttccattgaagagtgggctggcagccagcaataatgttttggctttgatagccaaggcagcaggctgggtaagacgtcccatttcggttgcctcattctgaatctttagaggtaaatcaccagtagcctcatcaataaggtttacgatataattgacgactgtttctactttatcacgttttatacgaacttcttcttccgttgcagagatggggagattgacatctacaatgggaatagggccatataattgaaatagatagaaatgatagtaagctttcagaatttttgcttcggcaatccatcttctcctgtctgtttcattcaagtcggtaactcgatttctgtccgaaacattttcaatgaagatattacagtcgcgtatggcttggtataaaggttttcctcctttgaccccatcccagtaattgtttattgggtcactgacattttgtagcccattagcaattccgaatgcccatgtattactgaaataatgatcttccatggtgtaataccaaatgtcattgccagcggtcagacccggattctcatgttgattgccatatagcggtacacgtgcataacaggtagccagatatttttctgcatttgctctattgttgaatgccatttcgatggttgctatattatcgggtacgacgtctaggaaatctgtacatccgcataacgcgcttactgccaggacagcaagtatctctcgtattttcatattcatattatttaaaagttaacacttaaaccaatattatatactctttgaataggatatccaaggccgttgccgcccatttcaggatcccacaatttgaacttactgaatgtgagaagattggttccatttaagtaaatgcgcacattgctgatgcgggctttgcgagtccatctttcaggcagtgtgtatcctagttccaatgatttcaggcgcatgaaagaaccgtcttgcatccaccaggtactggattgtgtattgtttggtacactttcattcgctaaacgtggccagaaggtatagatattcctgttggcctcagaccagtgattgtctgctatgacctttaggagagcattttgtgagtgggtattgttatcgtcatctgtatcgatgaatggtgatatacgattaggatcaatccagaaagaagaacgtgcattgccttggaagaaagcagaaagatcccaacctttatatcccgctgacaatccaaaaccataggttatttcaggagtggttggatatcctatggggaccttgtcagcttcagtaattttaccgtctttatcaacatctttatatttaatatcacctgccataagcttaccgccaaagttctgttccggtgagttggctatatcagcctcatcaatgaacaggcgttctgcaataaatccccattgctggctcagtttttgtcccacttggcttctccatggagttccggcacccagatagtcaggctcttctattttttcatatttgctggtggcataagtgaagttggcacgtccggtaacccataagtctttattgatggaatgtgagtaatctacagacatatctattcctttacccgatgccgctcctacattggcacgcacatcggctgtcaaccccatggttgagggtatatatgaacgggtcataaggatgctgttccgcttttcgtagaacacatctgcctgaatttccagtttgttgaatagccccagctcaataccaatgttcattttcttggctttttcccatgtgatgacttcattggcatagcgagtgacggtgataccattaatatggtttccccagttagttccgaaatcctgccctttattctcatcattcatgtttacgtttgacagatagaagaaacggtcattagaatcaccaatagcgtcatttccgacaagcccatatgtaaatttccatttcagtttattgattgtcttttcaagtggcttccagaacttctcatttgacatcaggtaacctacaccgaaagaagggaaaaaaccgtaacgttcattttcggcaaagcgttcggagccattgtatccaaagttaaattcggcaaaataacgtttgtcgtatgaataagtgaatcttccggatagtccttggtttttgtatggtagtgatttttgcagatctcctgcattgctattctgctgagtacgacgggtaaatactaacataccgctaattccatgttcatcaaagtctctattgtagctcatggcggcttccatgtagttagtagtggttacatcttttgctccttcattataattcaggtactctgtaccgccgttaggattcagtaaggtcaggctatatgtgttcttcgactggtcgtaggctcccatggcgtaataataaggattatagtagcgggaaacatccgaataaacatagcgggtggtactgataagtcctcgtacattcaatccttttgtaatgaaatccaggctttgttttaattcgccttgtgctacaatagaagtacgactatagtctttatatcctttgaccatatcggcatacggatttatgtaagtgccgtctccataattaccgaacatgaggtgtgtgttgtttgtatactcgcctacgttaggaaatgatttcgggaataagacaggacttgtcttcattactttattatagagagcatcaccgccgtctattggtccgcgataatcatcgaatgaaccatttacacggatgatagcttctgttgttttagtcaggttaatattgatattggaacgaacggaatatttctttaagctgatattgctattgaaattgttttgcttgtctacattcagtacaccgttgtcattgaaaaaagaagcagcaatatagtatcttgcaacattgccacctccactaatattggctgttacacgttggttcatagtgtactttttgaacatttcgtcataccaatcgacagctgggaaagcgtatgaattcagatttctgatggtgttatctatctttgattgagaatatggtaatactcccaatgggttgcgggttttgactgcttcattgtgaagctgcatatatgtgatcggatctgttgtctcaatagtacggaccggcgtagaaactgagttttctattctgatgctgactgttgctttaccttctttaccttctttggttgttacaagaattacgccgtttgcaccacgtgcaccatataatgcagtagctgttgcatctttcattatggaaaaactagcaatgtcatctacatttagacgtgcgaggtcagcggtggtgagttctacattgtcaattaggatgagagggcttgctgcatatccaaatgtcgttacacctcggatgaagaaacttgcatcatcttttcccggttcaccactggtttgataggctatgactcctgacattctaccggcaagagctgttgtcaggttactactcggcactttcaattcagacggtttaacggtagtaacagaactgataacgctttcctttttctgttttgcgaaggctacgacggttacttcatctagttcgtcaacttttggtttgagatgtacagtgtagtcgttattagtggttatcttaacattttcagtttgatacccgagaaagctaactaataattcatctcccacgttcaccgaaattgaaaatttaccgtcgatgtcggtgatgcatcctcttgtcgagcttttaacaacgacagttgcacctgctacaggggcattggtttcgtcatagatagttccttttacttctttcttctgttgatccactgtggtggtgacatagactgtcgcatttatgtgctctacaactgggaaaaaaggagctcctgaaaagcacaagatcaaaagagcttttcttaggccttgtgttgattgccaataatgttggctggctaatcgatgtttcataataattgatttatattagattaataggcatagttgttgcgttccagaaaaaacggtaatacaactttgcgtgtaactgttatattctaggtacgaaaatgagtgctattttttttgttcttctagaggttgaaacctggtaaatcttcttttaggaggtctctgtcgagaatgataataaggttaataaagttctgattttcataggcattagttttatttatacttatatgcaaatgtatgaattaactatttataataataggataaaatatggaatgtatagcaaaatatcgacaattattcctttttataattaataatgtaggatttaatcgataattatatgaaatatatcgattttagcctgtgtctggattattttatctgtaatggcaataatctacatctacagagccagtttcttttttatcattaaaacaatagattcctatccggtcacccctgtaatttccccatgtcaactggtatttctcaccaaaaggcagaaaattatcgccatccagactatagtagtattgggatttgccatccatcccccattccgttctgaaccagacaaattctgaatgtatctgaattcctttcgttatgttaccatttttcctgtattcaagataacaggcgtcttcttccttcactataccgatagccgagtgttgggaagagaaatggcagagtccatttttctgaccatcctgcatattggaaatatccatttttatagttacatcgttattctgttttctaaaggtgcgttgcgtgagtgtattgcctgcctttaataaattattagtttccaaaggtcgataggctttcagacgcaaccatcccggacgttcagtaagggaaaagtaatcttttcttggttgatagttccattgccactgcggagcaagacagtcctcatcgaagtcatcactacgtttgatagataacttttcagtatgtttaaaaggaatctttccatcccatttcattgtaccgatattctgagaaagcacttcacctggtatgggccaatcctgtacccatgtaacaggtaacagactgacaatccgcccgctccagtctcctgttccatgatgggtaagaaaataccagttattgtcctttcccagaataatgcctccctgattcggttccatggcctcacaactgggtaatgccaattgtttttcttccttatagggtcctgccaattttctggaacgttttgccatgacgtagcgtcctactcctggcttatgttcactgaaaatcagataataccagccgttcaccttaatcagcttactggcttccctgccactacctgaattaatgagtttcgcagatttccgatcaatgcttttcccatcctcagacatcttaaaaagataagtcttatatccgtcggcaaaatgagtgccgacaaagtaagctttcccattctcatcccacattgcagtacaatcatcccaaccgggttcggggagcaacggtgtcagcggctcccatgggccttcggcacgtgaagcagatgtcataaaatagccttcatcgggggtaccgaaaaataaatagaagcgtccgttatagtgccggagtgtccctgcccatacaccacggccatagcggtccatgcgggtccagtttaaatcttcgcttatttgtgtcaggtcatctatgatatttccatagatttcccagtttacaaggtctttggaatgcagaagtgtcattcccggggagaattgaaatgtggaggatatggcataatagtcttcacctactctgatacagtcaatatcgctgtaatctgacggaatgatggggtttatgtaggttccgtccccttgatcaccccaatttttccagttaccccactcaacggattgctgcgcaatcaggtaaatactaaaacaggtacaaaagagtactgataataagtgtttcataataacttcgcattaagattaatgaatgttccattcccagattcccgcaattccttttaaaatttttattcggagatagcggtatttcttattcggagtatcaatgtgtggtgactgcatttttatatcttcatgtcctccacagacttgccatacctttccatcggcagatccttcaagcaggtaggcatgtcctgccgtcggacgtacaaagtagacttcactgcggtgcacctttttagctgttcctaaatctgcaataatccaattctctttatcttggtcagcagccatccaacgggagccattggcaccgtctattgcaaaagccgggatgaaatactcagtacgacggcatgaaggatctttcatcggttcgatattcaatggagctgatatgctggacgcataaactgtatctgtctttaattttttctcttgtttaatttttcgtaaggcgcctactccttccagggtaagatcgacaggacggattgtgccgtcttcattgaattccaaccgattaacatatgtctgccggtttgtgctacgccgtccaaattccagataagcaaaatagtaatcatccgttccttccggattgaaaacacaaccatgccccggaccgaaaacgcctctttcataatttgttgtagaaataatatcctgttccggatattcaaaaggtcccattggagatgtcttgctcattacataagcatactgatatttttcatctccgccgatggtgtacaaatagtaatatatgccttttcttttaaagaagatggggccttcggaatattctttccggagagtagtaataatttgtgtaaccgagtctacggtgatcatatctttgcccagtttagccacatgacggcgtccccaaaatatataagcctgaccgtcatcgtcaatgaaaacctcggcatcgatgccaccgggatcttttgtctgcaataaagtagaagatgtgaaaggcttgtggaactcatcttttccgcgggccagtttaaacggtccctcggggttattagaaacagccggatacatatatccattgatagtaggatatatataatacttaccattggcaaagatagctttacttggagcccaatatttctctttcattgcagaagggaaataagtaccttcaaagctccagtgaacaaaatcatttgacttccacacaacaggtggtcctgaagtttctagtccctgaccatatccgtcggtagtggcgtagcagtaaaacataccctctatctcttgaatgcttgcatctgcaatcatgtcaggtattaaggcattaccgaaaggattgtttgcttttgtctgtgctgttattggttctgaaatcagaatactaaatactaaactgataaaaatatttttcttcataatattacaatcgtttttgattagatcaactgttagataaagcaaaataaagcctttctatcaaccagaaggtataaaaacaagttataaaggggataaaaaactttcatgatatgattaaatacccaaatgaaaggatttgaatatcgttattcatatagatagaacattcgttccattaatttccatttttcagctgaggtgctttctgcgacacactcttggaatctggatacataattctcccactctgcttgtctgggtaagtgagataatttatccatggcagttttccaatcaaaatcaagtggggtttctacaatcatgaacaattttgccccctctatatatatttccatttctaaaatacctactgaacggatgccttctctgatttccggccaagcttctgcttggctgtgacatcttctatacatggcaatcaaatcaggattatttttcaagttcattgtttggcaatacctttttacgcgacaatggtattcctttactctgtatcctttatctttcatattctttttgcatatggggttatcggctttttaaagccgataaccccatcttcctatttttagtatgaactattttcttattttgaatacaggagcaatcttattaacctgtttatcaggcatatttataagtaaccctttgtctgtacgtgtgaatggaactttaccatagcctaataattccactctgctaatcttaccagggaataatttactttcatcagacaatgatttgatgagtatttgcttttctgtcggccaagccagaaccgtagcatataagtcctttttagtctgtgtgaagcggatttcttgtgccgtagctctgctatatgatccttcgttgaacccttgtgcattaattttgatatctgcttcagctatcggaccttcaccgaatatttcccaaggacgagtatcaaagatggcctctctattaatattcatccaatctccgaattcatttaatatcctttcttccttctcatcaaaggtaccatcagcccgtagtggaacactgagcagcagattgccatttttacttacgatgtcaactaatagttttacaacatctgccgcggatttataccagttattctcataaatagatgtattgtaatgccatcctccaacgcatgagcaggattgccatggttgctccataatctcattgggtgccccgcgctctacatcccagactatagctttgcgttggttttcatccaatatcttactcagcatgacagcctccagttttcctttatgagtggccatattatgattgtagaagtgagctgcgatcttcaatcctgcatcgctgatagggtggaatggaactactgttacatcaaaatagatgagatcaggattgtaacgattgatagcatctaccgtgcggttatagaagttcgtgcaatattcttgtgtaggtaggcatgctccatttccccaagcccattggctatgtatcataccgtctacccaacttcctttactcatcggatgattttgcgcatataaatcctgcggatcgtatccttcccaccacttacctttaccgtcagcttttgtcagtgtaccatcgtaaggaacaccagctttgggaccgtttctatcataacgttgagagggctcataccaagtccaggcatggtcggcatggaaactgataccaaatggaagttcgtacttacgtgcagcttgttcccattctgccagaatatcacgttttggtcccatgttttttgaattccaggcttgatatttgctgtcccaaaggtcgaaattatcgtgatggttgcctaaagcgaagaaatattgtgcacctatctttttatagaattcaaccaatttatccgggttccatttttcagctttaaataaaggaataatatctttgaaacccacttcagaaggatgtccatagtgctctacatgatgtttatattccgctgatccttccagatacatggaacgtgccatccagtcgcctgaaccttctacacactgtggcccccaatgtgcccatattccgaactttgcatttctaaaccattcgggaacttgataattttccagtgaattccatgtgggttggaatttacctttcatcatgggttcgtttttttccgataccggaacttgatagttctgagcagataatgtccctatcgaaagagctaaagatgctaataaaatttttgttctcataggtattaatattgtttctattgtacattgcaaagatatggattaattagtagctttgataggattaaaaagtgcttgtattggaatatatcgatagatttattagaaaaagccttttaagataggatgagaacgatttttatatggagaatatcgataactattttgagggcttaataaaatcacttacctttatcaagttactaaatactatatactatggctttattggttgataaattgcaccctttagtgctgaatgtcggtttggctgtgcacaatgcagattggaattggaaaaacgtaaatagcccgtttacgcgtttgtactatataacagaagggacggctcaaatacaactatcgggaggtatacaaattctgaaaccaaattatctgtatttcatcccggcttttactatacacagttatatatgtaattcttatttctgccattactatctgcacatttatgaggagcatcaatcagatacgaacttattggatgaatgggaatttccggtagagatacctgccggcgatttggatctggcgttgtttcaacgcttgtgtgcgataaatcctcacatgagtttgcctaaatcggacccctcgacttatgataataactcgacgttgatggaaaatcttctgaagaacaagcagcgtgcattatgtgacaaggttgaatcacgtggtattgtataccagttactggcacatttcttaaagcgtgcgcaagttaaagtggagacaaaggacgatcggatagagaaagctattctttatatacgcaaacatatttatgaggccatagatctgacaactttgtctgagaactcatgtctgtcaaaagatcattttatccgtttattcaaaaaagaaactggtgtgaccccttcaaaatatatcaatcagaagaaaatagaaaaagcacaactcattttggtaactgatgagatgtccgttaagaatgtagcttttgccctctcttttgatgactattcttattttaaccgactatttaagaagacaaccggactgacaccgcaggaataccgtaattcttatcactgataatcggagatttagaacagtattcttatttgaaccatacccggtccgtacctggtccatgcgtatagatacggaggaaatacgggccggatacggttcaggtcttgagagagaagaaatacagaacattcttatcgctcatttttacggaaatcgtactccgattattctcgtaccgagaacttatagatgcattgactatgatacttttctcccggtctcaataccgccgatgcccattccggcttatttggtgtatcaggatacttctgtgtttctaagcagacagatgcacggaagttataaacgattcccttcttgcccgtcaaagttccatccaggaagttgccgcaatatacctgtataccgggttcattggtataaacatccagaacgatgccggtagccggtgattcaagggtggcacacaccttgtttacatctccttgagtattcaaaacccagttatgatcgattccgttgccattcttcaactgttcaaagtcctggttgatattggcaccgatagcggtgggctttctgaaatccatgggagtcccttctactgttactatttcgccggttgtcatgaaagtactgtctaccggagtataactatcggcattcagtgtcagcaggtaagcggagttatccgtagacggatcaccatccagattgaagtaagaatggttggtcatgttgacgatggtaggtttatccgtttctgcttcatattgtatatcgatggcattgtcatctgtcagtttcatgataacggtgcattgcagattgccggggaatccttcttctccgtcctttgccagataagtcagttgcaattcctggtcgctcttctgtacccctttgtacacacgatactggaaacctttcggaccgccatgcaagcaatggccgtagttattctgcggcaattgatattccacaccatccagtgtgaagcgtccctggttaatacgattggcatatcgtccgatacttgctccgaaatcagacggatatttgatgtagtcctgtatggaatcaaagcccagtaccatatccttcatgtttccatccttgtcgggaaccatgaccgatacgatgcggcctccgaaattagtgacacacacttccatcttgttcttgttcttcagaacgaacaagtccgttttctcaccattgacttctgtctggaaatcgcttcgcttcaatccggattcggtcagttcttcttttgtagttgcggtacatccagccatcagaactgtgcataccaaaagaattagtttattcatatagttttaattaaagtgactgtggcattgtgataagtagttgcattatgcgtaacttttacttattacaaacgtagtgaagattgttttgaaatcgtagtagtatagcaccaaaaaataaaactatttgttcattcttgagatctatggtagtggtaaggggtgctttcggtagtttttaacgctttctgtagtaatgttgtgtttatattatacttgtaggggcaatgttacccctacaagtatattgcaattgcttgttacttattctttacttttccgggaatatgattctataatttccgctcagatgcatgaaagcgaagaggcggagcaatccgtcatagtaagcatcgaaatatccgtcttcatacggctcatgttttgcgttccacaacttatctacaaactcgcggcttttctcgtgggtacacatcagtgaggcggcggcggaagtagcaaccagacctaaagaatgtcttaatgccttatgctctccggcccggagggtgtcttttacttgcgtgccgtctacgttatactgatctacgaaggtatcaataccctggctgtaaaggaagttctggattttattgccgtattcctgttgccactctttgtcggcacatgcccaagagtaatctaaggcgatgttcatcggtacgcgccaggagtcaaagcggaaagcatcgccgatgatgcggttgttgcccagcaaactgccgtcatagttgttataatcggggtttagtccggttacggggtggatacttttatgcagatattcgcggctgcgttcggcgcattcacgccaaaagtcagctctgccgtcattggcccagcgtgcccatacttcgtaaaaagcgggtacatggtaagacgggtcggtaaaacgtccgccatgtatgtccggaacgaaagtgatgagcttatgctccacattgatgaaaggcattacacggtttgtgccgtctttctccatggaacagttcaggatattctgggcttcggcaaggtagttgatgccggtgtcatttccccaacggttggaagcgaagatgagggcggttacatagtaaagctctccgtcggaggcggggccttgggagttacgggtaccgtccgttgcacaactccaggcaaagtaacctttcagtggaccatcctggtgctgcatgtactttgtgccccatcgccagagacggtcgaagatatcctgacggtcgaactggacggcaatcattaatccgtaggacataccttcggtgcggacgtcatgatttttgacgtcgctgatatatgccatagaatcgcctacttcaaaatatactttgtcagggccgtagaacacaccgtcgaagacggatttgagtttggcgtcaatgtctgcctgtttataacccatctcggcaaagagattccggtatttctgtgtctcaaaggcacctttatcccagggctttgtcgggtctgcctgactgcacgatgctccggcgatgagacagaggaggagatagaataaattcttcataaaggaatgtttttagtgaatttaaaggagttaagcgagctatttaatagtgacaggaattgatttcagctgtttcagttctgatgtaccgccatacagaatttcataatcaccttctatcggacgcatagtgttggtacttgtatcaaaccattcaaaattttctttgctcaaaggtatggtgacattatttgttgcccctttagctatcgctacacgtttaaaggcacggagtgcatgtgaaggtccttctttatcgcccggatggcgtagatatacctgtaccacttcttcaccatcgtatttacccgtgttgctaacaggaatagtcaaagtaacttgttccccatctttgatttcagatgtattcaaagaagcgtttccatattggaaaatcgtgtaactcaacccatgaccaaaggggaagagcggggtttccgtcatatagcggtaagtacgtcctttcatggagtagtcctcgaagtccggcaattgcttggtgctcttatagaaagtcaccggaagacgtcctgccggattataatctccgaatagaacgtttgcaatggctgtaccacctgcctgaccgggataccatgcttgcaggatagcatcgcatgttttcgattcgggagtcagggcgatagcggaaccggagaagttgacgaatacgatcttctttccggctttcttcaattcggcaagcagacggctttggatagacggaagttcgatggtttcgcggtcacctcccttgaagccgggaatgttgacatgcatttcctcaccttccactgccggggatatacctccggcaaagatgataacatctgcctcttttaccttgtttacggtttgtttcaggtcaacgggaacttcgcgtcccatgtcaaaatcgagtgcggcatcacggttgcggaaagcaaaatcaatcttgatacgatattcttttccggcttctgcctggagggtatagactttggacttgtttttgaagttcatgcctgcggcaacttccttgccgtcaattgagagtttggttatcccttgggtctggaaacggaaggcgatatcttcactcttggcgggacggaatacggattcgtaactggcggagaaatcttgcaggttgatgccggcagcaaaggtcgtggcaccggtggtgatgaagtggaagggtgtgctgatgtgattggttacatccggtgttccttcctgtttcgtattgttccagtatttggcactgaaaccttgcttgccatccatgctgcattgctggaatacactttgcaaagtgacgtcggaggtcaggtcgcatccgggttcgtagatgatctgtgattcgggcagatatttgcggataccctccaatagagtgatggtatgtgagggaaaaccattgtagttgccccattgcattacggagtcattggcattaggtcctaccacggccactttcaggttcttgtttaaaggcagtaaactttgattgttttgcaacaacacaaggctctcacgtgccatacggagtgccagttcacgatgttctttactatctactacgctgtaaggaatttgtgcccaggacacttgtgaaggttcgtccatctcacccaactcaaagcgggctttcatcaggcgcttcagagagatgtctatctgtttctcgtcaatcaatccttcctttacggcttcgggcagtgaagcatagctgtcgccacattccacatctgttccggagagtacggctttggcggaagcgtgttgtttgtcaggatcagtttcatgggcacctttgttgtagaagtcgctgattgcccagcaatccgatactacgatttctttatatccccattcatcacgcagaatttgcataagcaggcggttacttccgcagcagggttcaccttcaaagcggttgtaggcacacatcacttcttttacatgcgctttttgaaccaggtctttaaaagcgggcagataagtttcccataaatcacgcgggttgatgttctcggcattgaaactatggcggttccactccggaccggaatgtacggcatagtgcttggcacaggcatgtagcttatcatacttctctccttcaggtccttgcaggccgcgtaccactgccatacccatctgccctgtgaggtaaggatcttctccgtaagtttcctgtccccgtccccagcgcggatcacggaagatgttgatattgggtgtccacatggtgagcccctgataacgttttaattcgccttctttgctgaattcggtattcttggcacgtgcttcatccgaaactgcggtgaatacatcgtaaagcagttcgttgttgaaagaagctcccataccgatggcttgcgggaatacagtggccagtccggcacgtcctacgccgtgcagcgcttcgttccaccagtcataggcttttatgcccagtcgggggatggcaggagatgtgttttgcatcaatgcggctttctcttccaatgtaagtcggcctaccagatcattggcgcgttcttccgggcttagagccgggttcttgtagggaggttgtgaacaggaaaggaagcacagacacaggcatccgattccggtgagcaactgaagttttcttttcatggtattagtgcgtttttattgttattaatagacttctgttttgtcattgtggatgacgattacaaaaataggcagaaaagaggatttggaagaagaatcgtatttcagaaagttgagtctatgttacagatttcctccggatgttacatcttgttttgctgaggttacattaaagagaaaaatgcctgctacaggctatattccggagggggatattgtaatttgttgtgttaacctgttggcgggatttgtttctttccggtatagtaatgagccaaatgatcaagtaatactatcttaattctcctcctctggggaggaggagtacccgaagggggaggtggtaggtgagaaaagaaatccttattgatatcatctataggcatttcttgctttacctaccaccccgccctctgggcacccctcctcccaggaggaggggaattgagatactctatttactttatattggaattatcatttaactcataatcttacaagaaggaatcaattgcgccaacaaatcatattagttccttccttctgctttctcacatcggatcagaaccttctgttcattatttaaggtcgtagcgaacagataaacttctccgccttcgctcagtttgatacgtttacggagttccgctactgaacttggaaagttacgaaccgtgatattggctttcttcagatctcctaatacgccttttagctctttcttatttaatgtacatacccccgttatccggaaacttcttccgggaaagttctttatcggttcaccggaagtatagaggtggctgttaggatgcagcttctttaccttatatatacaggctacattgcggaaagcccctgctttgaggatggacgcgttgggttcgtacagatatttatctaaagtatcggtgtattcactcgggcttgattgttcctgttcgcgggtgaaggtgaagaactgtccggttgtctttgtatttctcccatccttcgtttgcagattgatgcaatggataggaatattctctgcggcaacagtgttgtgtcccaggataagcaagagttccttgcattcattgtttacagaaacaatatgtgcttcctgtacgtactttaaatcctgaatagccaaagacaggtcgagcataggggagagcttcaccattacgtgctgcgccttttcgagcagcagggattccagttctgctacattcggttcacagtcggcaatggcaacagtcttaccgccatgcccgtcacgacgggcaggatcaatgaatatccagtcgacggaagacatctcttgcagatgccggatgccgtctttgttttctatccggatgtgattcagacccagtaacgggaagttgtgcgatgcaatctcgcaaagaacttcctgccgttccacataggtgacatgatggaatctcggagaaagaaaagcacagtctatgccgaagcctccggttaagtcggtcagtgtgccggaggaagaccccggaatgatagatgctttgtatcgtgccgtagcttccgaagaacattgctctaacgataggtgacggggatatagaacgccttcttcctcatgccaggacggtattttctcagctgccgcctgtctgcccgctatctgcgtcagtgcaacaggcatatccacaccgggatatttcggtgcttgcagtgccaggctgcgtacatcatccttgcaatgttcacgtataaaacgaagggtttcgccattcaattccataaaccttgtcgtttagtagtttctttgaagccataatccgaagaaacggtcgtaaatctgataagctcccgcctcttgtgtgacaaaatccttctccaacagtccttttaatgccgattgtacagagctggaagatggcaatctatatttcttgataaatgcaccgtaggtgatggcacttgctttcccttctttggtaatggcaatgagcagttctttttgtttctcgggcatccggaaaagggtttcggatgattggcatggcttctttactttatgatgattatgcaaagataattattataaagtaataatgcaaagaaaataatggtggcttcacttagacctgtacttgtgcttcccggagcatcgtctccataatatccagatcagagttaacctcgccttgcagcaaatacttatcccgcttgcgcgctactttttcataaatctctttcgcccgttccggttgattctcccaatacaaggcaagagcgcacagcaagcgttgtttggaagacatcataatcttataccgttggatgtatctctttatcttatctgtataaagccgctctatttcttcttttctccgttcacctatcagttcgaggaacaggagttcacactcgatttcttttacgtatagtccgacaatttcctctttatgccgctctatttcgctaaacaggacgtgtgcggtttcaaattctttccggtctacatagcgcgaaatatagagcagtttaacggcaacctgcatgatattcctgtaatctgtcacttcatcgttcggaaaccattcgtccggcatgtctttcagtcttacgcctttctgaacttcagcgttgacggctaactgtagtgccagatacttccgggtattcaggtcccggtgcatcaatatcaggttgtaggcatcattcgtgatgcccgacatcttcaatggaataccgttcatcagtgccaggaagaagccgcagatataggagaatagaaggaataaatgtaaaggtagcggtatctcgggataggcaacccaaagaacaagtgcaaggattgccgtcagcagattcatcagtactccgcctgcattataccagaaataaggcaactgttcgtaaggcttatccggtggagagagcaggcattgtccgcccgtgccggagatggagaagcgtttgaaacggaactttcctttttcttttatcagtgtaaggctacctacccgaaaagaaacgaaccggtaaccggtggcaagtccgaagatcagatgcccgccttcgtggagaatgatttgtacaaaaacggcaaggatgagacaagtcaatgataagatacaggaaagcaagagtctgcttaactgtatgtttcccatattcccgaagaattcacttaatgtggtttccgtaaagaatgtaatgcaaagcaccactgcaccgaagccgatgcatgcaccgaacagggtggaaagtataagtttgagagcttgtttcatagttgcatggtatggagttcttacccggtttgtctgcacaaatataaaggaatataaggaactttatggtataaccttgtatttttgtttagcttcctgtcggctgcaccagttaaaatgccaccactcgctgggcaatgcgcgaaaacctgcggtacgcatgacgctccgcagcagttgccggttcgcctgttcctgctttgtcatttttccgctttgcaccagtgcggcttcattcgtgatgtgagcttcgggaccgaggtggtctacttccgtacccatcggcaggggatttcccgcttcatccagtatgctgatgtctactgccagaccgtagttgtgcagtccgccaccacgtgcgggattggaaacatagatatacttggaggtgcctttcactacattccacattttctgctgcacactcatcgggcgggcggcatcatacacgatgaggcgacggccggggtatcgctttttcagttcctgttgcgccagtagcagtcctttcatggcatcgggatgcaggtacgcctcatgcagatcttcgtatagcacctttcccgtgaaattatccgcccgggtatacatcaggtctacgatgatgctactgtctgcttcggcaatattcaccagtccgatgctttccagatatcttgccgtttcacttttttgtgcggatgcggggataaaccagagagcaagtagaaaataatatatatacttcatgactttttttctttgcctgcaaaggtacgaattcccaccggattagccattccgtgcgaatatatagattttatctattccttcatagaatttatctgtttgtaatgaacttacgaatccttacatttgtttcatatattagttctctaaacaaaaataccatggaaaagaaaaaactcacctctgccaacgggcgcctgatcgccgacaatcaaaacactcagaccgcaggacaacgtggtcctatcatgatgcaagacccttggtttttggaaaaacttgcacacttcgaccgtgaagtgattcccgaaagacgtatgcatgccaaaggttccggcgcatacggtacgtttaccgtaacacatgacatcacaaagtacacccgtgctgccatcttcagcgaagttggtaagaagacggagtgcttcgtgcgtttctccaccgtagccggtgaacggggagctgctgatgctgaacgtgatatccgtggttttgccatgaagttctatacagaagaaggcaactgggatttagtgggaaataatactcctgtattcttcctgcgcgatccgttgaaatttcccgatttgaaccatgccgtaaaacgtgacccgcgcaccaatatgcgcagtccgaacaataactgggatttctggaccctgctgcccgaagctttgcatcaggtgaccatcacgatgagtccccgtggtattccttattcctatcgccatatgcatggtttcggtagtcatacttatagctttttcaatgccgccaacgaacgtatttgggtgaagttccatctgcgcaccctgcaaggcatcaagaatctgaccgaccaggaggccgaggctatcattgccaaggatcgtgaatcgcaccaacgcgacttgtacgagagcatcgaaaagggtgacttcccgaagtggcaattccagatacagctgatgacggaagagcaggcggacgaataccgcatcaatccgttcgaccttacaaaggtatggccgcacaaagatttcccgcttcaggatgtaggtatcctggaattgaaccgtaacccggaaaactactttgccgaagtagagcaagctgctttcaatccgcagaatatagtggaaggtatcggtttctctcccgacaaaatgttgcagggacgccttttctcttatggtgatgcacagcgttaccgcttgggagtgaatgcggaacagattccggtaaacaagccccgttgtccgttccatgcttaccatcgtgacggtgccatgcgtgtagacggtaattacggcagtgccaagagctacgagcccaacagctacggtgaatggcaggactctcccgagaagaaagaaccgcctttgaaagttcatggcgacgtttataactacaacgaacgtgagtacgatgatgattactacagccagccgggtgatcttttccgcctgatgtctgctgaagatcagcaactgacgtgcgaaaatacagcccgtgccatgggtgatgccgaactcttcattaagcaacgccatgtgcgcaactgctacaaagctgatccggcctacggtacaggcgtagccaaagctttaggtattgatctggatgaagcattgaaagcaacccgatagttaagggatgtcctgaacaacactaagaccctgtatgcaaaagatggcatctattacatcaaaagatgccatcttttacagtgaaagatgccaccttttgcaacgaaagatggcatcttttgcatatccgggataagagatggatatggtatggtataaccttgaggttaatacttaataagcatctgttgcaagaacatacggtattcttgcggtgtactccctttcttcttcttgaatatccttataaaattagataagttattgaagccgcaagtgtagcagatctcggctaccgtgtgggttgtttctgccaatagctggcaagcgcgggctatccgcaggttcgtgatataatcaatgaatgtgcaattcgtcttttttttgaagaaatggctgaatgcagattcggacatgttcaccagttgcgccacgtcgcccagcttaatcggttcttcaaagtttttctcgatatagtcgcagactttggctatccgtcggcttttggaagtgcgtacggtgtctttggtatcatattggttgctgactaagatatggcggtcggcaatagaaagctcatgcaggatagagaaaaattccaataccgtatgaaatccctgcatccgggtcagcttgataatcttatctttcatcaccagttgggtttgtctggaaaagccaatgccccgttgtgattcaagcagcagttgcttgatggggttgaataagcgtttttccaatatcggaaagttcagcagcttgtccgagaactggatggtaatcacatggtttccttctactacttctcctttccaggcgtgtggaaggttgggacctatcatgatgaggtccagggcttcgaaagcctctaccgaatctccaacgatgcggcttccgtaggtgtccataaccaaattgatttcatagtccggatgatagtgtaccggatagtcgaacttggcgttcggatgattaagtacaatgaacaggtcatccgcggcaatgggagtgatttctttttgtatgtctttcatggtcgtagttgtttctctcttgcaaagctacgaattctaatgaaaatacagtcaggtattcaaaaaagtataatcaatagacagaatattataagcgaattatcagaatcccctctatttttgcagcatgaattcaaaacaattaatttctatgctatggagacattttcaataagcaatttagatcttgtaatagtccttgtttatttggcctttatcatctggtgggggctgaagaatggcaagagctcagactcccaatcctattttctggcgggacgctcaatgccttggtgggtagtggggttgtcgctgtttgctgccagtatttcaagtaccactttgataggtcagtccggtgatgcttatcacacgggtattgctgtgtttaattataacctgacgggtattgtggtaatggtgttctttgcagttttcctgctacctctttatattaagtcgggtatattcacgataccggaatttctggagaagcgttttgaccgccgttcgcgctattacttctccgccatttgcatcataggaaacattttcctggacgctgccggggctttgtatgctgctgcgctgattattaagctgatacttcccgatgctgatttgcaactgatcattattgtgtttgcgattattgctgcatcttatactatcccgggtggtttgtcttctgccattaatgcggaattgatacaggctgtcattcttatattaggatctatcttgctgactttctactgtttccagcaaggcggggattatttctatcagttgtttgccagtggtgatatatcggtgaagctgattcgtccgttgacggatacggccactccctggctggggctgatagtcggtatgccggttctgggcatctatttctgggcaaataaccagacgttggtgcagcgtgtattgagctcaaagtcagtggatgagggacgtaagggtgtattgtttacgggtttccttaccatgctgactctttttatcattgccataccgggtgtgattgcccgccatttgtttccgggacttgaaaagccggatatggtatatcccaatatggtgcttcaactgataccggtgggattgttgggtatcatgctggcagcgcttttgtctgctttgacttctactttgagcgctattcttaactctacgtctacactgttcacaatggacttctatgcgcaatataataagaatgccagttcccagaaactcgtgattatcggaaagataacctcttgcgtcattattgttgcggccgccttatgggcacctcagatcgggaagttcggttccttgctgaagtattatcaggagatgctttcttacattgctccgcctgttgttgcggcatttttgctgggcgtgtttaataagcgtgtgaatggaaatggtgcttttgccggactgctcagtggtttggctatagcggttgtgatgcttttctataagaatgaaatatttggcgatatgcacttcctgttgattgttcctttcttgttggtcgccagtgcattggtgatttatttggtcagtttgcgttatgtgaagccaatggaaagtaaactcaaggataccacattctctatggacgatttgaaagcggagttccgggcaactcgtggagtgacgtggtataaaaactattataattgggcaattatcttattggtattgagtgtggtaatatgggttgtattcagatgattattatattattataaagaaatagaaagatgaaactaaagaaatttgagggaaatccgatactttccccgacggatgcgaatgattgggaatctctggtgacttgtaacccgggggtaatatatgacgacggtacgttctatatgttgtatcgggctgcgggaaatgatgccgagcacgtcattcgtttggggttggcgaccagtaaggatggatttcactttgagcgcgtgtccgatatgccggcatttggtcccagcgaggacgggccggactccggttgtgtggaagatccccgcatcgtgaagtatgatacggagtattacatcacttatgcctatcgtccatactcaccagggcagtattggaatttcggacatgatgagattctgttgccagagtgtggcagcgatgcgcctatggctctccgtaaaaatctgggtaatacgggattggctgttactactgatttccgtgagtttaagagactgggacgtctgacctctccggtattggacgacagggatgttattcttttcccggaaaaagttcagggaaagtatgtgatgctgcatcgtcctaaagaatacataggcggtgagtatggcgtggattatccatccatctggatgaagttctcggatgatctgctgaattgggaggacaaggaaagccatttgctgattaccggaaccgagaactcatgggaggaaaagttgggcggaagtactcctccgcttaaaacggaaaagggttggctggtgctgtatcatggtgtggagcatggcggacggggatactatcgtgttggcgctctgctgcttgacctggaaaatccgctgcacattctggctaaaactcctcaacctatacttgaaccggaactggattttgaaacgtccggtctgtataatggttgtgtatttcctacaggaaatgtaattgtggacggcgaactcttcgtatactatggcagtgccgataaatatgtctgtgtagctacttgcgccgttgatgaattacttgattatctactttctgatagctgtagattgcactaaatccccttttgttattgatctcttatagttatcccatgtaaatgcgataattgatacctcttgcaaataaaacggtagcagggtgtggattatagccggaaaaacgttcaaaaaagtacaatcattgaacaagtaatataaatgctgtcattcataatcctcctacttttgtcctatcatgatatagctaatgaaaaatagaattctatgaatgtaaaatgtgtgtgttctttaattcttgataagtatgaaaaatgaatcaaaaagttggtggcatgtatttttgtcttggcagataatggcattatgcatgttctttagtaacattcccgtttcttatgcacagtcaccggataaaataacagttgccggttgtgtaaaggatgcagcaggagacttcctgattggcgctactgtgcaagtcaaaggaatatccggcggaacgattaccgatatcgatggtaattatatattgaaagatgtgccgcgtacggcaacattggtgttttcttatgtaggtatgcaaaataaggaagtgcccgtcaatggaaagagtacgatcaatgtaactctgcttgacgatgcacttcaactggagcaggtagtggtgataggctacggtagtgtgaagaagagcgacgttacaggttcggttacgtccgtcaagacggaagccttgaaagaaatccccgccaattcggtggaaggattgttacagggacgtgcagccggtttgcaggtcatcaattcttcacaggacccgggagccggtgctacggtgcgtatccgtggtggtagttcgttgcgtggttccaatgctccactggtggtagtggatggctttccgttgggagatgccggagatctgaagcagatcaatccgtcggatatcgtgaatatggaaatcctgaaagatgcttcagcctctgctatttatggctcccgcggtgcgaacggtgttattatgattacaacaaagcgtgcgaagacaggaactaccaacataacggttcgccagcagattaccctttcgcagtttgatacgaaacttgatttgtggcgcgaccccgtattgatggcttccttaaacaacgagtcgcgcatcaatggagggcttgatccgctttatgtgggaaaagtaagttccaccggtgtttactatccatcggtagaagaactgcaaactacctggactaccaatacccgttgggatgatctggtattccgtgacactccggtttccaataataccactgctacgatttccagttccaatgaccggactgttttcaatcttagtgctaatttctatacagataatggtatgtatataaaagatgactacacaaaaggtggatacaatttgagtgtagatcataatatatatgataacttcaaagtacgcttttccaatatcctttcccgcggtgtgcgcaatgccaatggtggcttgtcgtactggagaaaccctatttatccggtttatgacgaaaacggggactattatctgaccaatgcaagtgatttcagccatccgatggcgattacagacttgcagaagaatgaaaccaagtctttggatgtcatttcttccgtagcgttggaatggcaactcttccctttcctgaaactgacttcccaattgaactataagtttggcaagtccgtatccgacagatactatccgaagaaatataccgaagccggagaattcagcaacggtcaggcagagatagagaactgggagggacacaatctggtttctgaaactttcgccaacttccagaagaaattcgacaagcatgacattggtgccatggtgggttattcttatgaatactatatgtccagaagttccggtctgacaggtaaggattttgtgaacgaagcattgggcaatgagaatatgggtgccggaaatccggagaagaatgaaatatggaatggatattcggataataaactcgtttcaggaatgttccgtctgaactatgtatacgataataagtatctgctgaccttgacggctcgtgccgatggttcctctaaattcggtaagaataacaagtgggctatgttcccttcaggagctgttagctggaaagcgcatgaagaatcgttcattaagaatctgaatgtatttgatgagttgaaattccgtttcagctatggtatttccggtaatcagggaatcagtccttatcagactttaagccgttacggtacggataagtattataatgatggcagttgggctactaccatcggtccgggatatgtttccggctggacaggcccgggatggatttaccgggtatggagtggtattccgaaccctgatttgaagtgggaaacaactgcacaagccgactttggtatcgacatggcatttctcaaccgtcgtctgagagtttcttttgactattatgataaacagaccagcgacttgcttcgtgaacgtaatctggctctgtcttcgggatatgacaagatgtgggtgaatgatggtaagatccagaaccgtggttttgaagtaacggtagatgccgatatcctgcaaacgaaagactggcagttgagcggaaccctgatttactcgcgcaaccgcaataaagtgaaagacttgggtaacactttggaatccggtttggttaccgacccgatgacggggatgctctttgaatattcgggcaatagtcttgagcaatatcgcgactataccaatatactggctatcggtcaaccggtaaatgtgttctatggatataaagtggatggtattgtccagaccctgaatgaaggaatcgatgccggtttgtccggcgattacgctaaccccggagagttcaaatacatgaatctgaatggagacagcgaaatatcggaagcggataagaccattataggtgatcctaatccggactttacagccagtttggcgttgaacctgtcctggaagaagtttgatgtgagcgtattccttaacggggtatttggccaggacgtgttgaatacgaaggcattcggtgagcccagtaactctccattacgctggacacccgataatccgacaaataaatatccgagcttacgcgacggtcgtcaggtgaagatttctgattggtggatagaggacggatcgttcctgcgtgttcagaatctgaatataggctatacgtttgacttaccgaaaaagtcattcctttctaaagcgcgtatctatatgaatgcttctaatttatacactttcaccaagttcaagggatacgaccccgaagtagggttggatggagtttatagcggcggatatccccgtttgcgtaaatggactttcggacttgacttaaccttctaaataactgatacaatatgaaaaatagaattgtaatatcactgcttgccgggaccctggcattgggagcatgcaatctggatgagactccttacgggttctattctgaagataatttcttcaagacggcagccgatgcagaggccgcagttatgtatgcgtacggcacgctgaactacctggaatattccagaaccattttctttttgggtgatatggcaagtgaaaccatgacgaccaagtcggatgcaagtgccgacaatcaggacctgaataactggaaagtgggtaactttaaaacaaacggttcgttggagaatttcttcaagtatgccttcatcggtgtgaaccgtgccaatgccgtcattaaaaaagtgccggatgcaggcttcagccaagagcaaaaagacctttttctgggtgaggcttatttcctccgcgcctggaattactttaacctggtgcgtaacttcggccttgttcctttgcataaatcagtagtggaaacggtggatcagacttcaaccgcgcttgcgcctgatatggatgccatgtacgacctgattctttcggattgccgccgggctgcagaattactgcctgtttatgaaactcctaagatagggcgtgccgatcgggtggctgcgcaggccctggctgcaaaggcatacttgtatgtggcgtcggctaaagaacatggggtgaaactctatcgtgatatgcaccgcgatgcaacagtcatgtacgacagtgctgcatattttgcaggtgaagtgattgaaaagcagtcggtatatggcttcgagagctcgctgcttgatatttatgacgttgagaaagcacgcggcaaagagcatatctttatcatggcgatggaccggagcggttcttccgaagggcaatactctaaaatatccaagatgtttattccttatatagacggagccactctgtatctgaaacagggggacaaggatgagtatatccccactcatgacggttggggcgaatatcagaccacggttgctttttacaatacttttgatgcaagtgataagcgcaaaacagaacttattgttgataaagtctacaaggcagatggtacgctgctgggagaatatccaggaaagattccttatccgttctgtcgcaaatatatagacccgaagtttgaaggtgacaagaccagtacccggcctttcctgctccgtttctctgatgtggcgcttatttatgcagaggcggcaggtcctacggctaaggcctatgaactggtaaacttcattcgtagccgtgccggtttgggagatatgaagccgaatctggggaaagatgaattccgcagggaaatactgaaagagagaacttttgaacttgcttttgaaggcgatcatgtatatgatttgcgccgatggaaccggattacgacagatgttcccgaggcagccgggctttcggaagatcaggtgactttctatccgataccgcaggctgaaataaatttgaatggaagtctcagaccttaaaaagaagtaagattatggtaaaactaacgaaatacattttgcttgcctgcattgtgttgacccagcaggcatgtgtgaaagatttgcaggacgacatcaatgatggtggctggaatcatgaacgtaccatactggatatacaatttgaaaatcagatgggaaccgcccttattgagactgtggatgctgctacgggagatataaacctggctatcaatgttgatgccgtacccgatttgtcgaacatcaggctgaaaaagctacaactctcctatcaggcggaagcttccttagaggtaggagatgccttgaatttcgagaatggttcgaggagtgcgtcaatcactgttacttccgctaccggagaaacacgtaattatacgattaccgtatccgaatttacggaaactcttgtaggtacttgggatgtaaagaaattgactatttacggtggtaccgggccggagtttggtggaggtgctgtgatgcaattgacggacaagccttggtgctggtcggaaacgtatggcccgcaggctgagtgcgacaatgtgcttacctttacaatgaccggagtgacggatgagggcaatacaagcggtatctgtatcaatgatgcgggagctgatggaaaatatgctgatttcatcttcctgggtgacggtaacaaagagaatcccggtgtagatattgacttgaagaagttctatcgccagattcctgaaggtgaaagtacatgggtacgcgattatgcagcgaatacgattacttttacagataaagagggccggaagactacgggttctttagtggctgccggaacagaagacctgggtaacggactgagcatgactatcgagcggaatgcctttgccttcaacctgagtggtacggatgactggacgaatatttacagtgactatgacaagtttgtcaagaaagtgcgccgttactggatctctgtctccaaacgttgatatatcctatgaaacggtttgctatactctctgttttctttctgtggggcggctatgccgcttcacagactgttgtttctgtagatgcgaaacagattatcaatgaaggttacatcggtaacggtgctcagtgggacccttatcaattggattacggaaaaggacgtttggatatttccgaagccgactggaagaagatgtatgaccgtctggactttatgcgccctcagtttatacgtgtcatgaccaacactacatcggtaatgcaggatggagttctttatcccgaacgtggcttggagcatttgtctcatatattggattactgccaatcgcgtgatgtgacagtaatgttcggtgactggggtgggggaatggtagatgcccggaaagaggtgatccgtgaaaagaatctttccgctgctgccgaatatgttcgttttctgatagaggaaaaagggtattcctgtattaaatactacaatctggtgaatgagccgaatggctactggtcttcaacggacggaaaatactccctttgggcacgtgccatccgcttcttctatggagaattgcaaaagaacaaacttgcaggtaaactttcggttgtggggcctgatgctgcaatctggacggctgatgaggcctggtgggtggatagttgtgctacgcatctgaaagatgagattggtctttatgatatccatacctatccttccaaaataacggtgaacagcggggagtatactgacattatccgtgcctacaaacaagctgttccggcaggtcggaaaatcgtgatgggtgagatcggatttaagtttgtggaacctgccgattctgtttatcagcgtgaaaaccttcgtagggcagcggcaaagccttatgcttcgatggatgattctcaaatgtttgtttatgatttcatgtatggtaccgacatggcagatgctcttttccagacagtaaacgccggatattccggttcggtggtgtggatgctcgatgatgccatgcatgcgaaagaagcacctgataaactgaaggtatggggattttggaatatctttggcgaagagtatttcggtacggaagaagaggaagtgcgtccctggttttatgcctggtcgttgctgacgcgctatatgcctgccggttcgcgtgcttataaggttgaggtggaaggagacaagtctcttaaggcgattgctgtggaaaaagacggtaaatatatgattgccgtggtcaatgtttccagggaagagaaatctgtattgcttaaaagtacttctctccccgtattgaaaggtgtgaaacagtacttgtatgccgagggccggttacagaaagaaggtgattgccgattattaccccattgccagggggtgacattgcgcccggccaaaggcgaggcattccaaatgcccggagagtctctggtggtatatacgaatttcgattattaattgataaccgttcataataagattatgatgaagataaatatgattttaagttgcatgctgttatggctcgtatcagcttgcacctcgcaagaagtggtggaaattacggtctcaccggaagtgacgaatgccggatatatcggcaatggtgccgagtgggatccctatgatgaggctaaagcttggggtgcttctatctctgataaagactgggaaacactctgcaaacgactcgactttatgaagccgcagtatatacgttgcatgataaacagcccctatcgctattatgattccgcaacaggcacgtatgataaaactcggaatatagcttccatttcccgactcttgaagtattgcaccgagcgggggataaccgtcatgtacggtgaatacaatccgcctgtttgggatatgaagcaagataagaaatgggtggatatgtccgtcgactatcttaattatctggtgaatgaccttggtttctcctgtatcaagtattttgtaatcttcaacgagcctgatggaaactgggcttctaccaatggtgattatgaaatgtggaaacaaatgcttttccgttttcaccggaaaatgaaagagtatcccgggctgacggaaaaggtgatgcttgcagggccggatgtagtagccgattacaagaatgaggcttctgcctatgatgccgaggggtgggtgaaacaaacggcactggatgctgactccattatcggattgtacgatgtccatgcttatccgggtcagaatgaagtgcgtaccggacaatatcctgaaattctttcccgctataaacgtcatgttcccgaggggaaaaagattgttttgggtgaggccggttataagtattggcgtgatgctgattctttgttgatggcagaatataaccgccgggtcgaagggcatcctttcactaaagggagtgactgcaatatgctctgttacgactatttctatggcctcgatatgccgttgcttgccatggaagtgatgaacggaggatattcgggtatggctgtgtggatgctggatgatgcaatgcatagcagcggagattccggaaagacggaagatgttaagatatggggtatgtggaatattctgggagaggaagtatttaataaacccgatgaagaacagatacggccctggttctatacctggtcgctgatgtgccgttattttcctgccggaacggatatattgcatactgctgtagcttcggaagataaagatgtctatgtggtggcaggtacttaccagggcaaattgtcggtggctatggtgaatgtgggagagaaagataaatctgtgcagctcactttaccccgtccgatggagaatgcctccctttataaatatgaggaaaatcttcaacccaaggatgccgatggatttcctgttccccaggaaacgggatttcatttgaaaggaacgtataaaacgaccttgaaggcacagacgttccagttattaactgatattcaataataagatagttatgaaaaaagtatatatggcaatctttatcgccttgttgggctgttcgtcctgctctaaagataatgatgattctgcacccgaaccgccgggtactgaaactgtcgaactgagcatggtagataaaagtgcaacagccgaaactaaggctttgtatgcccgtctatgggatatacagcaaaccgggttcatgtttggacaccatgatgatttgttctatggccgtaaatggtatgatgtttcgggcaattccgatacgaaggaggtatgcggagattatccggctgtattcagtgtagattttgcggagattatggatgatcgctgcgaagggaatgaggctaacgctattcgcaaacgctgtattcttgaggcacgtcgccgtggggaggtaattattgcatgctgccacctgaataatcctttgaccggaggtgattcgtgggataattcaagtgccgaagtcgtacgtgggattttggaagacggaagtgccgtacaggctaagtttaagacctggcttgaccgtcttgctacatttgccggtgaattgaaagatgatcaggggaagccgatccctgttattttccgtcctttccatgagcatacacagacttggtcatggtggggaaaaagttgcactacggaggcggagtttatcggtctctggaagcttacagtcaattatctccgtgatacaaaaggtatacaccagtttgtctatgccatttccccgcagatggattccgtgaagcgtgaagaggacttccttttccgttggccgggtgatgagtatgtcgattttataggtatggattgctaccacggtctgaatcctgccactttctcttccaatctaaagactatttccgaattatcgaagaaaaagaagaagccttgcggagtgacggaaaccggtgtcgaaggatttactgataaggattattggagtaagcagatacttactcctgcaactgggcgcaaagtcagcatgattgtgatgtggcgcaataagtttgtcggaggcaatgaatcggatatgcattatttctctgtattcaaggggcatacttctgaggcggatttcattaagttccatgctaatgagcttactttcttcagtagcgatctgccggacatgtatcagatgcctgagaatgtggaggtgaattagtgaggagatctattgtgattagttctttaatttcttgaggaagatttaaaatacgagggtgtgtcgaaactttcataaactaaaatccccctcgctacaactatctgtggcgagggggatttcgataaaaggggagttttgacaccgacttcaagtgagagaattgaaaatcctaaggctcaatccagtcggatattttatcacaggtgactggacggtgattcttttctatatctatcaaaatgtcttattttaactatattaattattcaaatacattattccaaaatatagtatcaggttttacatgtctataaaatcttctaaaaaatacttcatagaatttagctttctgtacatcagataatttgttcacataatcttctaacaatcttttttgctttacaaatgagttagtttcagtaacagggagtttattcaaggtcgcaaaaaatgtctcattaatattggacattagtattttagcaatatcatcatcaaaatacggtaagaattctataatagaaatggcttctatcacattccgggtatattgtgtccagcctatcttagtttttacaagattcaacaatgagtcattgtcctgcatacgattcccatttttgattattccgaaatattcccccatataaagagtatcattgggaatactttcttcatagcttacgacggtcataattcttggatctattaaaaaggttgaatcgctatgtgaaagccttgaatacaaatcctgaaattgtgcaataaacataccatcataagtagttaaaatattgagatcttcgccaaattgggctatgaaactgatatcgcaagaagcggctatcggcatgagagctccttcttggccatatataaaccttattttagtaatgtcctgagatgttagactattactaaatagtaaaaagacaaatgtgactaaaattaatttcatggttctggcgtataactatttctaaattctttgattttttttcttaactcttcggaacttttagtactaaattctttattagatattacggaacgagttacaacccactgaccatcagcatgactttttcttccaggatgatttgcgggtaattcaccatttgccttagccgttttcagttcagctccttttataacggaacgttcttctgtagtaccatatttattatcaatcttactgtctactccttttttattattaaccgcgtgcgcagcttcatgttcaagaccggtagctggtgacaaaatattgccatcatccaacttgagaccagctgtaggattgaatcttatagcatttgcatttggcaagtacacattatcataacccgtttctataactccaattctcatctttttatcagttgcaattgcttgcatattttcaccacctccattcgctacattataattatatgcagttataacatctttgacaaatgaattttgaggagcttgggctgcatttattccattaaacataaagtatctttgttttccgttctcatctccataccaaattaccatatctgctccagttggatcgatatatttaatcggattatttccacaatacgtatacgggctcatttcataatacttctctgtcagtgggtctactgctgtaaaccttcccagtgccggatcatactgtctcgccccgtaatcataccagttcaaccccttctttgtatccagttccttaccgttatacttataagcctgaacattaccgtctgctgaagcaaacgtgcctccgaagggatagtaatggtttacttcttctttctgtcctgtttggtctacaatcacacggttattaccctggtgatcctgcaagtagtagtgatatttcttgtcagacaacgtgatatatcctgcatcggtcagcaagaatttctgcaccccattttcatagaccacatttccgcaatagtcagtcgtagtggtagtgttacctattttatggacagtacggagtttcgtgccgttcaatgcataagtataagtaatggtactaccgtccttaaacgtgaccttgcttggcaaatttaaacaattatactgaatatcagtaatattcttatttaaatctttcgtcatatttccattcttatcataagcgtactcatcggcctgcttcacggcatccttgaattcaaagccaccattataagctgtagctgtggcagcatcgtccgtacgcattagcttgttaccgtccagcgtgaacgtcaggttgtcgatcaggccgtaagaggaagctcctgtgcgaccattacgccggagtgaggttatattactttgtttattatacgtatatgaagtactgtaattcgtactggaaataccgttccataaataatcagcggaggtcagtcgggaaagtccgtcatatctgaatcggtatccgtgtaatcccgtatcatccgaagccttccaactcatggcggagatattgccattgtagcagggtgtgtttccaccatataactcgttgtaatacaaagtctgattgaacaatgtaccggtagattggctcttgagccatgagcggatgttataggtataacttgttgtaagagcagacatgccatgccgcttgcaactttttatacgtcccaagtcatcgtacgtattttctatgagtgtcacctcaccatttgtgtttaatttatgttttgactttgacaggcggcccgcatggtcgtactcgtatgtacatacttccgtctgtgtagccttacccgtggctgtatgaacatgctggcgcttcaaaggatcgcctatgaagttataggtaacgtactccacttcagttcctcccaaatggttcgttgtccggctttggatgatacgtccgcgctcgtcgtaatagaaagcggcgtaatcatatccggtcactctggtagcgtccacgcgtgctgttaccgttcctgtcagcaatcctttgctgctttccgtgtagcgggtcccgtaacctgaagggggtgtggtgtagttcagagaggtgggtaccccgtgcttgccgatgaaagagtagtcatcgtagtagttcactgtatacactacaggagtcgtcaacgtgatattctcggggatataaccatgaaaggcagtgcctgtatcatcacgtcgtgctttcacattgatttccgataactgtaaatcctcgtaaaaataggagttgtgacaagttcccgtcactaccggacgactaaattcatcggaaagggaaaagctccattctccgcgggcacgttgttcgccgtcttgcgagaagacctgatggcttccacggtcatagatgtaatagatagcatcacgttccggaagtttcttgtaaatgtagcggtgcaggaagtcatagcggtaagaataactgctttgcctattagaagctccttcaggttctcccggtttggggtaaggaacggaaggtgggtaaacacccaccagatcgtcgcgactgtcatattcataatgagtgaaatagggttcggaaccatctatatgtcccgccaggattgtacgtcccaatccgtctttaaaatcataagcctgatttccgtcttcatccgtagtacaaacgcccaataaatctccgtaggaaacccagctggaaaaattgggaaacgactgaggattacgggtaacatagcggtagcttacagggtgttctgcccatgcctcgcttgctccatgttctgcaatcggtctgttcagaggagaggcttcgtaggtggtctgcacatagggacgtgaatcaccgcttgccaacgagcttgcgccgctcttcagggaggagatattcatatagctgccatttcctgtagacttggcgggaagccatgttcgtagcttacgtccctggtcgtcatattcctgtagggagacgatatctttcttgtcgggggtgatgctgcggtctactgtttgtgagggacggcccaggccgtcatagtatatcacctgttcacggcaaccactacggtcggccgaggtgtaagtacgggcactaatgtagttctgagaagtgcttacctgcgacatgcacaagagttggcacaataaaagtgaaagtaatagatatattcgtttcataagtgtgtacggattttagttattggttacggtaatgatagtcatattcctgcaagacgcgtttctcgctttcctgcatgatgttgttttcgtaatagtaatttctcttcaggcgtcccaattcatcgtactcgtaatacagggtctttcctgtagggtcggtgacggagctgacgcctattaacggaagatgcgtgaaaacagtgacctgcgcttttgagagggacgtgtgtttgcgcaaggctttcagtttggctgcatcggggagggaattctgtgccaatgcagaggatgtcatgccaaaaatggaggacacggcggcttctacctgtgccagagtcgcattcttgatctctgcaataggatatcgatctccatatccccataggtagaccgtatgtaagttgtctctggagattacttcgcggggatttccattaggagagtaagcgaggatttcactgtggaatctattcgttgcatagcacttttgataaagtcgggcgggcagtattaatgtgtctccgctctgtgtgggaaactctccgaattcacgttcataaccatcggaattactttgtttttttgtcagcacgggagcgataatgtgtttctctaccattttgcggattatatccgtggtagtgccggtttgtgacaatttaggatattcccaattggtttcctgttgcagcttacctgcaacgtgctttttctttagcatccggttgccggagagatagttgtattgctctgtttctgtaatacctgtttccgattcatcataaatggttatgtcacgctggtagaggagtgagtgtccgagcaattggtaggtaaaagtgtagaaatcaccaagggtagcggtttggggaacaaaagataaagttccatatcgattggaatattcccaaccttccactgatgcgccactgggatgccaaatgagtgtttcgcgtcgtttcagtttatactcctgtccgtcgctcatgtagtcagtttgttctttcagcaaattatagcgatatttctctcccacatacgaaagcacattgttgaagtattgcggtttctcgaaaaaggctgtgtcatactgcattgcttcgtagatgtcatattgataaacggttttcccattacaattttcgggagtatatgtagttgctccatctttcagataatagaccgtgacttcgggatagaccactgcaggacggccattcagtaaccgctgaaaattaaatgcgctgaaagtgcattcccattcccatttagcagcaatgagacctgctgatggatcataactcataaagggattgtaattgaaagaacgatattgtccggacggatcaaggccgagcaccatgtttagtaccgacatcggaataggctctgatgattgataagtcatataggtctgaatagtaggatctaaggttggttcacctgcacctgtatgaaaataacgtcctcctattccaccgtttgcgtcataatcagtttgcccgtaacagtagtgtttggagtcacttcgtacaccttctgccgtataattgacgatttcataaatcctgaaaccggtagcttgggttttgatacgtctttttttgttgtgaatatagtcaccgtcataatctgtaaacgtaaagaactcatggttctcaaagtgaaactctgtataaccacccgtcggataggttagtttgtttagcacacaatgagcttctgcactgctcggtgttcgtgtattggcgtatgaattggaaatcctcactttatccaatggagacaggtcatctccatctttgggtacatctactacgtaagtggaagaggcagctctggatacatcgaagccgacaaaaagattcaggcagcccacgttgtgaatatcggaacgataattcaggttgccccaatggtctgttcctccaaagctggcgcttgaagatgtatatccacattgataagtctcggatgtaatgccattgctaccaagaagtgtaattttgtcaagagtactaaaaggtaagttccccgatccgtgatagtgcaaaattccttgatgttgctccagattgattttccggataagcgtgccgttatctctgatgttgatggctttggcatagttgtaatgctcgctgtcgctgccgtcttgatagtcgatgttgatggttgtgctgccataagctatggaggttaaaagtttcatttgataggcgtgctgttgcgtataggtttggaaagtgacgtcaaacctgtccggatctccattcacttcataaatatgatggaaacgtaccgctggttccacctgttgccgtccatagttggagctgatactctttccataggcaaaagtaataagctctgcggaatgaggtaggcggattgaagtcagttgccaagatacgtaggcagtaccataaggggtaatggtacatcccggtcctgcaaaggtagtatctgcgccatcgaaagaatattcaatgccttgttcgtccaccactttaaaggaatatatcttactggcatcagccacgtgggttatctttacatcgcgtccgcctgaaaccacgtactcgagcttgccatcatactttatccggatgacaaagtcgaaagaactgccatcaggcagggtggcggtaaagaggtcgtactttaaattgagtctgttcatggttgcttccgtaaagttacggtaggatttaccaaactgatcggtatccagtttgaaacctgtagtctcatcgggcatacattcaatgcttcgggatatacaactgcttacagataatgcccaaccatggccgaatacgtcgtagttataacctggatgaaatggtgtaggattatacttcagacttaaaggtaactgatagccgtggtgttcgatattgaacaaagggatggaaatatcaggcactcccatggctgggttcactgccacgtctccgtacattttgaaggccgctgcctgaggagaggtcggaacagaaggggcaatgtatggaagctctgatcctgcatgtgccgcaaatggaaaaagtgtagcgaagaaaaatagtataaaaatgtatcgtttcatatatctttgggttttgtgatgattagaaaatgcgttttactaaagtcttaatcatgttgtttttttgtttgaaatattgatttgaaatcctgcagatcccagacttcggaatctgcaggattaaaaaaatatgggaatctcgcttttatagcggcattgcattagctcctatgactcccgctatagctgatgccactgcgataaccactttcaggatcatatcccatactgatttcttgattgccataattccacacctcctttcgtaagggcacaatccgcccgggtggcgctacaacgcaccacaattaagttgatacttttcatgttgagtgaatgaatagtttagtcagaaaggaaagagctgtttagcccagcgggttttcgtccaatcctccatcgccaccgtcgctgtttccaccgccgctaccattgccggaaccggtcggttccggattatagaggacacatttcacgccggttaccaatgaccgggtggctacggtgcggtccgaattacgggtggaggctggggtgaaatgtatctgcaacgaggcctgcgaggcagatacttcctccttagtcttcacacctttaccccttgatttcatgacaacccggaatgtgccgaagccgtccagcgtcaccacttcggatgattgcagatgtctggtcagtacggtaaccaggttgtcgatagaattcttcacgtcaccggtggaaagggaggaatactccgcaatttcccgggcgatcttttcggtgtttacagaacccacataaatggtgcggggatggaatagtttgtttccgtctttgttcttcattgttgactgaatagtcttgtaaagtactggcataataataaagtttttgagtgttgataatttattgtttgtgtattaagcttaaccacattgcaaagatacggatgtttttatgatggaaagaatgatttttgcaaaagcgttcaagaaaatgtttattgatggaaaataacatgaaactattagttttgttttgtgtatatcagtcggttgtctcacgctattccgctacatctgccattctttccccaaaaaaacatcccaatccttttttctcattcccgacacaaactcagcagataacgtcccggcaaacgaatttttccatggcagttgcgcagatcataaaagccctgccacaccggatgcccgatggcgccaaagttgcttttgcagacgatagcgtactgttcggcaggcggaatgggatagaggcgaaggttgtagataaggccgtcaaagttgcgctgtaccttgtcctgaggtggttgcaggcagcctacttcctcggtagtccactcctttcgcttaccgcttcggctggtggcttttgtatcgttagccgcaactctttctctggaaaaattctcctccttctttccctccgcggacttctggtccgcgtctccctgagttcccacttcgggggaactattgaggaggggatattcttttgtatgctgtgctatgctattctgtgctatgctatgtgtaccaaagtacacattttgactgttctcggggaaaaatgttgcatttaccgggataattgctgcattttcacctttatacaattctttttcttcgggggtgttcaaaacggtttccggatttctctctgatcctttctccgaatttacagccggatttatttctctatcctttcctgaatttatctgcggattttccccagggactgtttcctgatttgccttcgggcttttagaagtatcttcttcatgttccttacctttaccggacgatatcgccggagcctgttcctcaggtgaaagaaggcagtaacgttcatctatcagcgaaatgttgcgacgcttggttgcgaaaagaaactggcgctgaatatcggctgaagtcagcaagccatattcccggaagagcgtggagtcaaaaagaccatactctgaggcgagagtaatgacacgttgcacgtaggctgcatctttttcatataggttgtccgccaggtcttcgtagaaaagagcatctgccagtgcataataaccttcgttagtgtagatgctgcaaagtgtttctaccagtacggttacggcggcatcgccttcacttttcataatccggcgtacaatgcggtcgtgtataaaatcggtgcttatggggaaataatcaagtccccgtttttttattctggacatggtttttagtgattagtgatgaattgttggtgatccgtgaatttgtgaccagtgatcagtaaccgtattttcggatacaagctactaaccactgatcactaaactctaatcactcattacctcctctttgagtcttcgccgttttcgtgctatgctttcgctcaccacttgcttggcgtggcgaatgagggctatccgcacctccctgtttttgaccagagtgatgacgagataggctttcggattgtcagggattgacgaatgaggttgttgcttccgcctcagacgactactttctgcacggcatttcttgcaatagcaatcccggtattgacttttttgactgacgtaaaaggcttcacaaggaagctcctggtggcattttccacaaatgcgggttgggtttgataataattgattcatgattctgacttttaaaagattaattaaaatatttgtgttgacaggtatattcagatatgtaacgcttgtgtttcatgtatgtaacacttgtattccacgtggacggaacttgtgtttcatgtctgtaatgcttgtgtgctgcaaattcaatgtttattccagttcacatcactgatgtgcctttatacaggcggagccctactttctaaaaggtaatgttgctttctcatgatatttatagttttatttttgtaattaaaacaaataactgtttttattgctacaaatatactgtgaatttcatatagaaaacaagcagttttagaaattaattttaataagatgcgtaagtgcgtatcaatgagcgaatactgcgttcttaattccttacaatgaaaaagcttcccaatcatcatcacctgaatacggggtgatggcgattgggaagccagggagaattaagcgatgcggaatatgcgaatggaaaagtacgaatggattagtattcgtcgctcagggaaataacttttaattgtttttcaaatgcaggctgcggtaaatcggtatagacattcactttcacagaaccgccgggcaatatatcgaagtaattgtcgctgaatgaactgtccacatcgccgatggttatgaatacggcacgggcaaagctgtcgctgttgagggtcagttcgaaaccgccttcgatgggctctatgctcgaagtgatagcagctttgggatagttcacttctttctgtttcacgaggaagtagttattggcataagtgtttttccctttgtcggtcagcaggacggcatgaacgaatacatcttctttaggtgtattttttaaggctttacccaaaggaaccgagaataccgtctggctactgttggcgtctatctttatatttcgtttgtaactgttcactttctctcctgtcagtttcataacttctacctggagcgtgccgttgcaggatttgaggcggtcggaaaccacctggatgttcaatactccgtctgcgtcggtgatgggagaaacgaggatgtcacggtaagccttgcgggcaaagtaatgctgcgctttccagcgaccgtagtagtcgcggcttgcccaggaagccacgggccagcagtcgttgtgttgccagaagagcgttcccatgcagtagggcatatcccggcgatgtgcctcgatggctgttttgatggcatctccttgcagcacgtggttcatgtagaggaaggcttcgaagtttttgggtgtacgatattcgttcagcagataagtctcaatcagttggttggcgtgcatgcctccgcgctgatgggacatcatgacttccgaatagatatcccagtcctcttcacagggagcgtagcgcttcacggattcaaattcggggaaggattggaagccatattcgctgaaaaaacggcttcgttctttgttgtacgtctcgatgggctttttgccatgccacacatcccagtagtggcggtcgccgttgtggtcatcgctgccgccgtcttcacgggcgaacggggaagaaggccaatagaagctctcgggtgcgtattccttcacaacttcgggaagggtgacgtaatactgatcggtgaactgtttccagatcttcttttcatattccggattctgcgccttgtatcgtttctgccaaccccagttgaaccaggcgtcattacattcgttatttccgcaccagagggcgatacaggcatggtttcgcagacgtttcacattgtcgatggcttcctggcggatattctccagtaattccccttcagcggggtagaggctgcatgcaaacatgaaatcttgccagacaaggatgccgtagcggtcgcagagttcatagaacaggtcattctcataaatgccgccgccccagatgcgaagcatgttcatgttgacattggcggcgtcaaggattgtcttttcgtactgttccggtgtgacgcgtggcaggaagttgtcttgcggaatgtagttggcacctttggcaaagacggggacaccgttcagttccacatagaaagtctttccatccttgtccgggcggttgatgatcttcagcgagcggatacccacttttgtgctctgaatgtcggatgtttcgttattgatggtaagtgcagtacggaagtcatataaatgctgttcacccagtccgttactccaccacaatcggggattccggatgataaacggaagggaaatcttattgtttcctttgtggagggaaacggttttgcctgccattactctgccggaagcggcatcagtcaccgtaagggtggcttcgtctatttccttgtccgattgaacttctatttctcccacgatggatgcacggtttttactgacttcctgttgacggatgaagacatcgctgagtcgggcgtcgtcccatgcttcaatgtatacaggacgccaaatgccggaggtcactaagcgaggtccccagtcccagccgtaatgataaccggctttgcgggcaaatacgctgactttcttgtcgaataccccaccgttttcggactggtcgttactggcttcgtaatggtagggcagtgcatcccatttggggatgtccaccttgatgggagaatggaaatagattttcaggatattttctccgggtttcagttccgcctttatgtctgttttccattcacggaacatgttgttggtttccagtattttcttttcgttcagatatacgtctgcataagtgtcgagtcctttgaatacgaggtctatattctgcctctccattatttcaggagtcagttggaaggaggtctggtagatccagtcttccttatctatccactgcataccgcgttcgttgaggcggaagaagggatcttcgatgatcttattgtttattaagtcggtgtgcaccactccgggaacggtggcgggataccagttgcttagccgggcttgtttgaattgccagccttcgttcaactctttccggagaggaacggctattagcagggcgctgcacaagagtgatgaggtcagtagtgacgctcgcttcatgttcaaattcggttttttcatgactgttagttattgagttatgttgaatgtcgcttttaatccttcccggctgttgcctcctatccacaaatcaaactttccgggctctacacaatagtccatcgcatagttccagaaggataactgctttaccggtagctccatccgtatgtgccgtgtctctccggctttcagatgaatacgctcaaaagcagccagttcctttaccggccgggttacggatgctgccaggtcgcggaaatagagttgcgctatttcggtaccgtccgttctgccggtattagttaggtcaaaggtaatgataattacttcattccgggtatattgagtggaggataattgcagattactgtatgcaaatgttgtataggataagccatatccgaaggggaataggggatctttgcctgcatccagatagaaagaggtgttccccaaagaagtttgttcggcacccacagggatggtgaagatattcttttcacttccgcttgccgggcgtccggtgctagtgtggttgtagtaaatggggatttgtccggtttcttttgggaaggttacgggtaatttgccggaaggcacaaccttgccgaaaagaaggtttgccagtgcgggaccgcccattgttccgggatggaaagcatagagcagtgcatccgagatattcacttcccgtccgatggtaagcggtcgccctgccatgactactgtaaccagcggttttcccgtttcggacaaacggtgcagtaacccggattgcgccccttgcaaattcaggttggcaaggcaatgcgcctcaccggaaagtatggcttcttcgcctacgaaagcaagaataagatccgcttcccgggctaattccactactttattgaattggctggtgaccgtatcgcgtgaatagttcaatcccggggcatatagcactttgatgctgtcgccacttatccggcgcaatgcttgtagaggcgtttgcgagtatgaggcatcaccgtcaaacacccaggtacctaattgctcatggggtgcgtccgccaatggtccggtaacgagaattgtctttatgttgctctgaatgggtaaagttcccctttcgttctttaataaaacagccgattgttcggccgctgtctgcgccgcttccaggaaatcggggcgatagaatgtctcttttctttggtcggcaatgtatggatgttcgaataatcccaaccggaacttcaatcgcagaatgtttcttaccgcattgtcaatggtttccatggaaacttttccctcttttatcaattgagggagatgcttgatataggtttcgctcaccatctctatatcggttcctgcatttgtggctttcagtgccgcttccttctcgtcctcgcagaatccgtggcggatcatttcggagacggatgcccagtccgatactaccgtgccccggtaattccactcattgcggagcacatccttcaacaggaaaggattggctgaagaggggataccgtcattatcgttgaatgccgtcatcagggtggctgctccggcattgacggctgcttcgaaagggcggagataaaggttgcggaattggcgttcggtgatgtaggtggagttgtaatctctgcctccttccgaagcaccatatccgacaaagtgcttggcacaggcagcaatggaggtcgggaggtttagattactcccctgaaaaccttttatcgctgcaacgcccatttgagagacgagaagcgggtcttctccgaatccttcggctatacgcccccagcggggatcatgagtgatatctatcatgggggcgaatgtccatcttattcctgcggcggaagcttcggtcgcggcaatccgggcaccggtttccgcaatctccggattgaaactggcggcttgccccaaaggtatagggaagatggttttgaatccgtgtatcacgtctctggcgttgataagcggaataccgaggcgggagtcttctacggcaatgcgttgtacttcattgaagatgtttgggtcggttatgctcatcacggagcctactctgcccttgcgtgtttcggttttaaggtatgggaagttctcacagtgcaattggttcatttgccctatcttctcttccagtgtcatctttccgaggagtgcctcaatacgcttttctgtctccttatccggtttgtaatcagtggaataacagacgtacggatgaagtaaaagtaagactgaagttacataataaaggatgtgtctgaacatatcggtatgtatgtttaaaggtttaattattctgtgtgcaaatgtacagaacatgccttttccgatatgattagattttgctgtttaatgatactattttgaagaggaggattctgctgggatatgcgggtatttaccaatcactacagactcgcacaggttaaaagctgataaacttattggtggaataaattccttttggtacagtaatgagctaaatgctgataatgatttaggcgcggattacgcggattaatggctgcgctattacactatattacagaaaaagaatccgtgtaatccgcgtaatccgcgcctaaaattatattcatactggaaaagaaaagaacaaaagtgtttagtgataagtgattagcgccattcggtatattattttttagacgcggatgacgcggataacgcggatttaaaaggctgcgctataaaaaaagatccgcgtcatccgtgtcatctgcgtctaaaagattatttatcatttagttcataacccgtccgaaatgaacaagttgctctctgttcaactttccctcacctctttaaagatatgggataatcgtaatataaatacccgtaataatggccgaagtgataaccccggaaatattcgctcccaaggcatctcccaggataaacgagtccggattatctttgctcaccaacttctgagccactttagccgtagtgggtacacaactgacggcggcaattccgatcaccggattataatttcctttcttgataaagtacatgatgtatccacccatgatgccgccgataccggaaagcaataatgccactatacccaatactagcagtttcagaatcttcggatcgagtaacaagtgcgcgtcacaaagcacacccagcaatacgcccaacataaatgtagaaccgtaaagcagcggaccactgacgaaatcatagatatgcttcatacccgattcacgtacagccactcccaggaagagggagaagaacagcggtgaagctaccgggaacaggaaacacagcaccgcacacagtacggccgagaatgccagtttcactttggcatcataattcttgggagctttctttgaagtcatcttgatggcacgcaggcgtttcggaaccaggagtttcaccagatacgggtaaccgccataggtcagtccgagatacaggtaagccactacggtgataggtacaaacaaatgtttggcaagagccagtgacgtgaacagaaccataggaccgtctgcaccgcctaccatggctacggaagcactttcctgcaaggtcagtcccagagccgaggctacggggatagtcaggaaagtacccagttcggcgcatagagccaggaaaagactgacgaaaggtttctgcaacagaaagcctacatccagcaatgtgcctatacccataaacacaaagcaggctatcaatccgttgctgaaggtgagcgtatagacaggttgcagaaagtctatctgcatcgtattcatcaggtcgtccgtgtccgaaagcatcgggtcgagaaagaggttgcccaatgtgccgtccggcataaaaagtgttccacaattgatggcgaccatacccagtcccatcggaatcattaccataggttcgagcactcctttccagcccagatatataagcagcaaacctaaaaggattaaaaatacacgggctgacgcgagcaggtagccactttccatcatcgttccaaaaccttggaacagggttgcgaaatctatattttccatactgtttcttatttggttttatcggctgatttgccggagtgtttcttgtttttttgatatagcatctcttcttgttgattcaggtacatcatgtgtgtatcttcggggtagtagtaatctaccaggttggttttggacactccggtgcttactccgtggtaatatccgtgatagtcggtgagttcccggtttactccccggctgaactcttcgcgtttgtcatcgagaagtccgttatcttccatggggatgtcccgtatcatgagttctaccttctggcgcagtttgcgcagacgtcgcaggcgaagcagctctttctgatgtgagctgtagaagtcgaatgagtcggcggcaatggcaatcattttgatgatgaaggccacgaagaagccgattacgaatgtaagccccatcatttcgagggtggctattaataaatcgagcatagttattgcattaatttagaagtgaataaacaatagactgaccaaagacacgccaatggcatacctccggaaaatggttggtaataagtaaggtggcggcgttaaatcagaatatgtttcagctcgtagacgtagtacccgtaagaataacggatagcgctgggagtgaaagaaagactggcattctgttccaccggtaagtgggtggaaaatatacgttgcatctgttctacagatggatggatctttagtttcagcagttttgagggagcactggcctgattgtagaaattctcctggaaaaggacaccattgattttacgctcattattttcatcgttgaagaaggggcggtgggcaatggtcgagaagtaatcggttgacattgagatgaaacatcccgtttgggcaggaatgacagaagcatctgtcgaggcttcggtaagcatccgaagtgccggctgttcctcttgtagaatggcggacattcctaatgcgaggcacataaacaagaatatatagtgcagatgtttcattgtagcgtccgcaaacataacaaatatctttgtgtaatgttgtgttccccttcaagaaaattttgttaaatagagaacggtttctttgcgcatgttctgcaaatgtgtatatttggaataatatatctaaatatatcgtaaaccacaataactcaaattcttatgagcagtaacatatttctgattatcgccgtagtcacaactggtatttttgtgatacagtttatcctttccatcttcttcggagacattgatgcggatgtagacgtggatgccgacatcagcagcatggtgtcttttaagggactgacacatttcggtatcggtttcggctggtacatgtatctgattggaaatactgacattcagagttatgtcgttgccattctgattggtctgtttttcgtatttgccgtgtggtttctctataagaaagcctatcagttgcagcaggtgaataagacggaaaagacggaacagcttgtagggcgcgaatgtaccatctactttaaacagggggatggcagatatactgtacaggtgagtcgcgatggagccatgcgcgagatagatgtaatatcagaagcaagtaagtcttatcagacgggcgacaaaaccattatcatgacttacaaggaaggaacactgtatattcaataaaaacgaaactcaaaaacatagatttatgacacaagaaatgatgattatggccgccatactcgtggcggttattttgcttaccttcattggtatcctttcccgttaccggaaatgtaaaagtgacgaagtactggtagtatatggtaaaacgggcggtgataagaagtctgccaagttgtatcatggtggtgccgcgtttgtatggccgattattcagggttacgaattcctgtccatgaagccgatgcagatagactgtaaactaaccggagctttgtctgctcaaaatatccgtgtggatgtgccgactactattactgtagctatcagtactgatcacgacgtcatgcagaatgccgccgaacgtatgttggggctatcaatagatgataagcagaatctgattacggatgttgtatacggccagatgcgtctggttattgccgatatgacgattgaagagttgaactccgaccgtgacaaattcctttccaaagtaaaggacaacatcgatacggaactccgtaaattcggtttgtatctgatgaacatcaatatcagtgatatccgtgatgctgccaattatattgtcaacttgggtaaggaagctgaaagtaaggcgttgaatgaggctcaggcaaatatagaagaacaggagaaactgggtgccatcaagattgccaaccagataaaggagcgtgaaacgaaagttgccgaaacacgcaaagaccaggatatcgccattgctgagacgaagaagttgcaggaaatctctgtggctaatgcggataaggatagaatctcacaggtagccattgccaatgctgaaaaagaatcacaggtggcaaaggcggaagccgaaaagaatatcaaaattgaacaggccaataccgagaaggaaagccgcattgccgaattgaactccgacatggaaatcaaacaggcagaagccggaaagaaagctgctatcggacgaaatgaagctcagaaagctgtggcacagtctgacgctgaactggctgtgactcgcgccaatgctgacaagcaggccggtgaagctgaagcacgttcggaagctgccgtgcagactgcccgtgaaatagcacagaaggaagtggaagaagctaaagcacgcaaggtggagtcttctttgaaagctgaaaagattgtgcctgctgaggttgcaaaacaggaagccattcttcaggctgatgctgttgccgagaagattacccgtgaggcggaagctcgtgcaaaggctactctggcgcaggctgaagctgaagcaaaagctatccggatgaaactggaagctgaagctgaaggtaagaagaaatcattgcttgccgaggctgaaggttttgaggccatggtacgtgccgcggaatccaatccggctatcgccatccagtataagatggtagaccagtggaaggaaatcgccggagaacaggtgaaggcattcgagcacatgaacttaggaaacatcactgtattcgatggtgggaacggagggacgagtaactttttgagttcattggtgaagacggttgctccaagtttgggtgtactggataagttgcctattggtgagactgtgaagggaatcctccatccggaaggaaaggaagacaagcaggaaaccaagaatgaagaaccgaagaaagatgaaaagaagaaataatcagactatctgaactctcctcctttcgggaattgctctcccccgataacgggggagtcggaggggggtggagtaccctgaaagggggaggtggtaggtgaaataacagaatacctattaatttaaaacaagagtttttttacctaccaccccgcccttcgggtagggaatgtgccaaaactctccttttatcgaaatccccctcgccacagatagttgtagcgagggagatttttagtttatgagagtttcgacacaccctcaattaagatagttaaggttatattcccagccgttccttcaatagccggtagcctgtcaggctaacccgtaatttagttccgtttttcaataatacttggtaggtttctttcccgaataattcaacccgggatatttgtgtcacgtttacaatggtggaacggtggatacgtacaaaattatttgtcggcagatgcccttcgaaatacttcatggtttgttccttgatgtattcgcctgttggggtaaccagggttgcgtaatctccgcatgcctggatgtagagtagttcgtccactttgattatgtgtatacgtgaaccgtcctttactgtaatacggtcgatgatttcctcttgtgcttccggcttttcttctgctgcttgcggtgctatgaattcttcttcctgtgcgggatctttcactactatcagttgataccacagaatgatagcgatccaggttggtacgccaaacagcaggcggaaaggtatggtagaagcaaaagatatataaggtattcccgctattcttaccataatgtcacaaatcatgaagctgcccgcaatccagagtaatattcctgctgcgaccgtgatgacctttgtctggagtatggatacgtagcccaccacaaaccaggccaggtatgccagtgctgcaagccatccgatggtcgtgattccgtctatgatggccggcaaccagtcagctccggcatatccccacgacaaggtcgcctggatgattgtcagaaccaatgccaacacaagcatcggaaaccaacggtaagggtaatctatgattggatgtgctctcataggattagtcttttatttctaatccgccgaaggaaatgtttccgcggattattaatgtactttctttattaatattcgctccctgccaacgcttgtcctcgcatccgccggcaaaagcattgcattggggcaggacgttccagtctgaaggaatgtacagttctattccactacaggtacagtcgatatcgatgtaggtttctcccggtgcaagatgcgtgtggcgcaggtcaatgacagttcctccgaatgaagcccggatgctggcgcctttaaataattcgtccagaacgacatggcgtacagagccaaaagcattgtcggagcgcagatacccgttttccgattcgcattgttgctcattgtcttccatattcatgtgcatgtgtccgcctcctcttctggcccagtcccggtaatggccgttcatgtggcttttcatccagcgttctctgcgacgagcctttacaaaaaacaggatacccgctacaatcagtgcaacaggccagacgatggtctgtgaattttccggtagccatgataatcctccgatcaggaaataaacacctattaaggttagggtggctccgctcagataatggcggcgtgtcatcgtataaatacctaatataataagaagactatgccaggataccactacattgaataggtcatacgtaatccaccctacgttacgggcaaacagtaatattccggagataatgaagagcgaagctatcagtgccttacctgataagcctgcatgagacgggaagttttgtttcttttccattgtttctattgttattgattcatattccattgttatgggttgatggctcaaaggtaagcgaattattcctctccatatagcctttccggctgatttccggtagaaaagccgatgagttccgggtatgaatcggtgaattcggatggtgaaatagaactatttgataaaaaaacagcaatattctgcaaccaaacttcatcttcttgcgtctaataagtaaatgaataaataataataagaactatgaaagtaaatttatccatggatgatatccgtacgaaagtagaagagtatattaaaaaggcaggtcgtgctaccggtcgccccgtacttacggcttattatgtaatgactgccgatacgactcccgataatgagcggaccaatataatgcttgctttggtggccattgtgtttcctaccagtatagaggatgttctgggacagatttttatggtaggtaaaggatttgctgctgtttatgcttataaaaaagtgaagaaatatatcacaccgcagataaaggataaggtagaggcaaagctcgacgagtggttccatgataatgtgacggaggtggagccgctttatctggagttaaaataagaacgataggtttataacttcaggtttaagatcatagaataaggttgtaacttttgctcagttagggggcgtaaagtaaactgtgtcatgcgctgtttttctttcaagctcatcggtcggggatcggccagcgccaagggggtgcaccagcactcccgacgagcgtaaaattacaacaacttaaatctatctccaaactttatcgccagttgttgggcaattgtgccccaattagccagtggcatagtccatttcttgcgtatgttgcgataagcgaggtagacaagcttctcaagggcggtgtcattagggaacacgcccttgttttttgtaactttccgtatttgccggtggtagccttcaacggtattcgtcgtataaatcatacgacgtatatcggatgtgaactggaagtattcagtgagcttttcccagttgtcctgccacgacttgatgacgataggatatttctctccccatttctgatctaaatcaagaagctccgtttcagcggcatccttgctgactgcaccgtaaacccgtttcagatctttaagaaactccttctggtgtttactgccgacatatttgatggagttacgtatctgatggacgatacaaagttgcactatggtatcagggaatacgctttggatggcatccgggaagcccttcagaccatcgacacaagctatgagaatgtcgtgtacaccacggttctgtaaatcggtcagcacattcaaccagaagtttgccccctcattcttagagatgtacatcccaagcaaatccttacgaccgtccttatctatagccaatacgttgtagattgcacgggtaatggcacagcctctctcatccatgactttataatgaatggcatccatccaaactatcggataaatatagtccaggctacgcgaacgccacgcttttatttccggaagtacccggtcagtgatggaactgattgtttcggcagacacacggttaccaagattctcttccatccagtcgcttatttcacgtgtactattaccaagggcataaaggccgattatgcggtcagcaacaccttccgcaagaatggtctcccgcttctttataaactgaggatcgaagctggaattacgatcacggggtgtagaaacggtcacctcacccatagaagtttgcacctgcttctgcatcttgccattacgacggttgccactcatgcgttcatcctcggaaagatgggcatccatctcaccttctaaggctgcatttaaaatgctctccaataacggggcaaaagctccgtccttacccaacaagggcttgccagccttgagctgctcgattgccttgttcttgatcctttcaaaatcaaattcttcactcataaaaaaactgtgttagcaaagttaatactttttttgtttgctttgctgacacagtttaaattacagcctcgctcagttacaacctttattctcgttgatgtgagagctataatcaaagaggttctatggtatatgtatagtgatatactttattctttaataagaactctttatgaactctaggtgaccaactgtcatctcctccaagccccatctgcttataatcaatatgtaaccaattcttttcaccacgaattaatgtatgcgcttttttactgcggttcaaatctttatcggagtaattttgaatattaaaattgaaaaatggttttcctgttatacgtattccgcttccgaaatcatcatatatctccaaccagcggttatccgttttatttccattttcttgaggcataatatgtggaaaagactgttcactgacaattccattataaataccaacataagctgattcttttctatcatcatagctttcgtgagggcctcttccaaaccaggtgagatttttccactcaacaggtaatgcacacttcattccgactcttgccaatgacaacacatctatatttatataaaagatggcatcaatgagaacttcaccttcatgtgagattgtataatttgctttttgcaggatattaccttctttgaattctaataggttattaacataaacttgcacatctccggtaggtaaaatcacgaaatccaattgcttggtttttattttagatttttatcggtttgacttaaccggttgaagaataaacttttagcgaattatttgagaaatagaggtaacgatttagcaaccgtgcgaatttcagcgttttgcgttgctatgctgtcaaataactctttcagttgcaaatataatatctttttccgaaagtacgaactatcggcggctattttacaaagataacttgcgaaaaaagaaaatcattcatcccattcatgggttataatgttaggggtgttgtcagctttgtcattttgtaaaagttcataagtgtctaatgtttcgtctaaccctattattcctttgggggcttcaaatctccagctatatccgtatttcttatcgagatagtcgaaaattatttgatttctttttacgctgtgagaataacctaaaattgttattcgctgtgatttatctcgtaaactttcttttgtgtaccacgatgccttaagtccatatttatcccaaaaattgtctttcagaactttgttttcttcttcttttgaaagaattaggcttaattgtggtgtatgaatactaaggtctggcaatataatctttaaatctgtgttgccattaattagaattacagtatctacacgctcaagaccaatacatgaaaatgttagatgatatttcccttttcgtaggctatctattttgaaatatccttctgtatctgccagccaaccacgttccggcattccttcaatttgaatataagcaccagcactcaagggggattttgttgtttgattaggaactatatattcttctacaaatgttcttcccgttatggaaaaatagtttttttgcgcaaatatacatatagggaaatataagaaactcaatagaataatttttttcatggacaattcaattatgatgtgtaaatgccaaaagcccccagcgagaaccccgccagaggcttcgtgtataatagtactaaatatcctaaaatatccgcaattcattgctatccttaggcatatatagtattatagtcaattcatcttcacattcaaatccttgttcatcagtataagaacatttaagtacagattctcttgtatctcgatctaataccataacagtttttccttccgcatagaagaatatttcgtaattatcaataggtgatatctcccgattctttttttgaggattaaaaacatttatatcttcttcaatatcttcggatatttcttcgggtgtctgatacagagaattggcatattgtgaatatttgtcaaaaaccatattccaataagtttccacatcgccagcttcatacaaccgacggatttctttcattttctccaaagccaactgttctatattgggtatctttctcaaatcgacagcaccgtcaagccgataagtatagtcatacggaacgacagcatcaaaatccaaagtcgtttcataatagggaagcttttgatctatgatctctttcggtaagttccaatccaatacggttacttgttcttcgatgggagagttcgggcttttcccgtatgtgacggttacttgcaaccgggtaatatccgtcaaagttttttgctgcgatgttggataaatcttaatccgcaataactgttttccacttttgagtatggacaaattcattggaatactacctgttgatccccactctgtaaagtcattatgcagtagtaaatcatttacgtcaagttccacacgacacccgcctttattgacttgcatataatatactcgtttttcggaatactccttcaacgacttaaccagttcttccttcatttcttttttacccatttttttagttgttgattggcacgagcctgttgttataaggcagaacaaagctgcaataataacaagcaatctgttttccataattcaaagtattttaatatacataattcaacgtttattgtcccataaggataaatgttttaagtttcataattggtcgtttttataatttaattatatctctttgcgaacaaatataaaaaaagtacggtacaccacgaacggcgcaccgcacttttttcggcaaatcgggcaggatttaacatttatagcttcattcccctgcctttcctttgcggctgcatagggcggtgtatgttttgccttagcttgtcgaactgctccttgaaccactcggcaatgggctttcggtcgatggcaagaaccagtttcgtcccgtccgtggggtctttcaccacttgaaaccctgccttttcagtcgtgaatttccgtccgtgttcctccgaatagagttctcctgcatactccaacggctttcctttgacgagcgttgcggtctgtctttcatcgaacccaataaggcggcagaggttttcgatacggagcatttcacggaaatagggaaaccatgccgccgcccttgcaattaccgttttcaagaaagatatttcctccttgtgcttcgtttccttgtccgctatctccctgccgtgcttccgctgcatttcccgtatttctcggctgtggtctgcctgcagggtctgtattctgtcttgcagggcttcgatggtttcctcgtggtcggctacctccctatgcagggcggtgttttccctttccagcgtcttgaccttgttgctgccgaaaagagaaccgacactctcggcgatgttggcggctgcggtggttgccgcccctttcagcttctcggtctgtatttcttttttcgcccgtttgagttcctcctgcgccgtttctttctgctgctgcaaatccaccacttccgctttgaggtcgtcggagagtttctgtatatcccgataatactgctgcgtggacttgtggcgagccttcgagccgtctatgcccctttgcagcccgtatttcgccatcgcttcggcataggtatcttggtaggacttcaatttcagccgtgtcataatatcgtctgcgcacagcctcacggtgtcggtcggcttcttgcggtatcgcttcttcgtctgttcctcccttttcctgcgctttcgctctcccttgacgatagggacgagcgtaacgtgtatgtgcggcgtttcctcgtccctgtgcaggtgagccgccacgatgttctcctttccgaacgtgtctgcgaagtatttcagattgtcggcgcaccactcgtccaaacgcccctcttcctctatacgcttcatgtcctcgtgcgttcccgacacgttgatgcggattgcccgtacttggttgcttccgattttgcgtgtcagccccgcttcttccaatctctgctgtatagccgccgaacggtctttcactccgtcggggtattcgatgagcctgcggttcaggtgcgtgcgtgtaggggcggcgttcttcggaatgatgaaacgctcgatatgtgcggtcgttccgctgtcgctgccgtgagccttttccatgtgtaaaactacgaaacccatatattcttcctttcttttttggcttgtgaaacaatgatttttgtatcttcgggggcggcaaatgccgtccccgatggggtgtgcagaggggcttgccccttgccttattggggaattttcagcgatacgtagtattgcggctcggaaaattccctaataagctacggtattttctacgtaaataccctgcggcgtgctgcccgtctgcctttcggcggtagctgtccctgccgtctgcttacccatataaccccaccttattttttccctttcggtcggtgggtggcggggcggttgtttccgttttcaaaggctcttttgcatggggcggtcggatacaaggttttcccgataaatacgctcgcagcgaagcgagaggaagatttatcgggaaacggcgcagccgcctgaccttttagccgacgtaaagccccgtgcttgctttgcctttgtaaacggaaatgattgctccgctttcctctgaaaagaggaatagaacctgcaatgtatatcaccatagtgataggtttgcatgctggtatgtttgcatgttggtatgttgatatatcatcatgctttccaacggctgttgggcttgccgtccgaaacaaccgacacgaataccgtcgttttctcttttcgcccgtttataatcctttccaacaacactttgcggacttttgccgccccgaacgattcgatacggaaagcgagggcggctatcgtttcgaggttgtaaacctccgcgctgtatctgtccgatatgcggataatgcgctttatgtcatatatactcaaaactccgcttttacagagtgcctttatccctgcccgaaccgtcggggcgataaccccgaacagttcgcagatttcccgctcggtcatggcggttgcacctatattgctcggcaggaagatattgccctgcccgtccatcgtgataatattcctttcttttttcatcggtattctgtttttaattagatggctcggcagatattcttctccatatcctccaacttgtgcgacagggtttccatgtcttggcttatcttttgggcggtgattttggcgtaaatctgggtggtttttatgttcgtgtgtcccaaaaggcggctcaccgtttcgatgggtacgccgtgcgacaaaagtacggtcgtggcgttcgtgtggcgtgcaacgtgataggtcaaacgtaccttgaagccgcattgtctgcctatatctttgagtatcttgttgcaacttccgttgctcggaacggggaagacatgaccgtcccttgccagccccttgtatttctccatgatacgcttgggaacgtccaaaagacggatgttcgattcggtgttggttttctttcttcgggtgattatccacagattgccgtcgaagaatgtttgcaggcggtcaatggtgaggttcttcacgtccgaatacgccaaacccgtgaacacggaaaagacgaacaagtcccgtacaagttcatgggtggcgttcttcatcggtgcgtccatgagcgtctgtatctccgtttgggtgaggtagcccctgtccacactttcgggagagttgatatatccggcaaaggggttgaacggcaaacgcccgtcgttcctcgcaatggaaacgatgtgtttcaacacaatcatgtagccccacacggtattggtgcggcatttcttctccgtgcgcaaaaaatactcgaaatcgttgatgaatgtgaggttgagttcctttaacggaatatcctctcgcttgtaggtatggggcaaaaactcccgaatatggttgcagaccgtccgatagcgtgtaaatgtaccctgcgccctgctgtgcccgactttcttctcaaattcggcgttgtgctgctcgaacagcttcagcaaggtttcctgcttgatgccgataccgagataggcgtctttgagtttggcggcggtaacataaccgtccgtctgcattaactcttgatagcggcggtttacctctacacggattttatctactgcaaggttaattctctgcgcttcgacgctcttgcccgaagcacggctgttcttcacgtcccacaaccgtaggggaacgtccatcttgcaactgaactgtttaatctcgccgtccaccgtgatacggcacatcagaggcaggttgccgttcggcttctcgctgcctttcttcacgtaaaataataccttgaatgtacttcgcataactcactcctttttttggttacaaaattagttcttagtgagttaccgacagctatgtaaatcaacgcaaaacgcagaaaaagaaccttttagcaagaaatttgcacccgttatgggagtaacgaggtggtaactgaacttctgcgccgtttggcttcgaggtggtatttcgttggctctgctccatagaaaaacaaagcgtaacgaacgctgtatcagctaattcgctacgctttgcccaaatttactttttcgctatgtgtttattttataatcatccaatcctactttgcgccatgaacttgcataagaattattacgtccttcatcgttatcggtcggaacccgccagaaacatggtaatagaggagattccagcaaattgtttcctttatagctgaactgtgatatcgctccggtgagtctgtcaaattgtatatgaaaacttttccctataactgttagtccattttttctttctacccgaagaggagaggttgtttgaacttctttctctatgaacggttcgggaagtatatctagagctaattgctctgaagcgatctcaatactaccgtcagaataattccgttgttcagtatcataaaaactaaagtttacatggtattcatttccagcttttaagctttgcctgggtaagtccaattctatcaattgcttgctttggggagctatattcaaggtcgtaatcgtatcatgatctataggaagaccgttctctaataatgtccaacataaaataattccttttgtatcagtgaaatagttcgcatttgatatagaaacaagtccttcatttatatctatattttctacattgaaattttgaaaaactttcttcaattcatataactccggttgaacttcccgatcaggatttactaaaccatcatttgaatttgcaccgtcactataatttattacttcccaatattctttgccatttttatctttcaaacgtagtccctggtctacccaatcccaagtaaaccctccatgcatacggggatatttatagaataaattccagaactttctgaaattgcctaaaccatttcccatagagtgagcatattcacatatcaacatagggcgtgactgatcttcattatactgcttgataatttcattaagaggattatacatatttgaaatgaaatcataccttgaaagtacttttgcataagcaggattttttgcctcataatgaaccggacgtttctctgggtcacatctttttatttcttcataagccttgtcaaagttctttccccaaccagattcattccccatagaccagaagatgatagaaggatgattcttatctctttttaccatgttcacattcctttcgacaatagcacttttccactcatctctttctcctacatagaatccttttgcccacaaaccatgactctctacattagcttcatccattacatatagtccatactcgtcacacaagtcataccaatccgggtgatttgggtaatgggaagttctcaccgcattgatattaaataatttcatcaatttgatgtcacgttccatcgtttcacgggtaatatatcgcccggtataaggatcgaattcatgtctgttaactccttttatttttacaggttgtccattaagcaacagatgtccatcttttatttctacctttctaaatcctaccttttggtgaataacttgttgtacgctgccatgcttttgagataattctatatccaagcgatataattcaggtgtttctgccgtccactttaaaggagaagaaactttctctgagaacgagatttcttgctcttcacccgaagctacactgaacaaaaactttcttgtccatattaatttgccggatgtttcttttaaagaaatacgcaaacaaccatctttgacaaattcgcttgtctcgttctttatagaaacgattgcatttaattctgcatccttatactccgtatccaagttagagaaaatggagaaatctctgatatggactttaggaagtgcaaataaaaagacatcacggtatataccacttaatctccaatagtccaaatcctctaagtaactgccgtcagaccaatttaggacttggacagtcaactgattctcacctttctgcaaatatttgctgatattaaactctgccggtaacattccatcttcatggtatcccactttttccccattcaaccaaacatacatggcggattgtactccggcaaagtgcaaaaagatttcttcatctttccagtcagtcggaacaacaaagtttcgacggtatagtcctattggattggaatctttgggaacatagggaggattaggttcaaaggggtattttacatttgtaaaaataggcggatcatattctccttgtagttgccaattaccaggaacattaatataattccatgaactatcatcgtaatctacactataaaaagcagtaggagaggcttctataccggaaatatacttaaatttccattttccattcagagaatgtaccatggaagactctcctcgttctacctctgcaacagatcgataaggtatataagaggcatgagctggttctgtatttacactatttatttcaggattctcccattcagataatacttcctgagagtggacaagtgttacagtccaacatataataaccagggctaatatttttttcagcatatctattgggtgacattaaatgttttatacataaaaagctgttcttttttatcattaagggctgattgtacatctactttttctaaaataactccttttacgtccgatgttacaatagcaggtctgtaatcaaaggtgtgaacttttaatttcacattatccaaccggatgtcatctgcatgacgtatgaagattccccacgcaggaagctccttaaattgtgaaaactccggataggttgttctcatctcaggtattccttccagttctttcgcggtcactccgcatttggcatagaaaggattacctcctcctggagattctatatctatattcttgagaataattccttgaattctatcttcaggtaaaccgataatacttgcaggagagatgttgcgaggtagatgttctaccgggccttcgtatgaataacctgcatcaggcttagagcttgccagcttcacgttgaagttggaaagggtaacattcttcataagcggtcttcgtccggaattccagcggtctcctattcgtagatagaatgcatttcctacattcacggcacgtacactatcaacaagtatgttttcgataatgcctccatccacagtggcgaatgtcacggcggaacggtaagtgttataaatcgtgagattcttgatgataaaatcacgaaaaccaccttttgatgctgttccgaattttaagccactggcacttgaacgtatgatgcaattatcaactactacattctggcagatttgcgatggctcatgcgatttgaaacagattccatcatcggcagcatcgaaaaaagaattgctgattctgacactatcacaatctacgatatctataccgtcattattccagtaagatttacaatcaacatttatattatctataatgacttgccgacactggtcgtaggcttgattccaacttgccggatcgtgcatccgtactccttcaactcttacatttcgacattctctaaaataaatattgtggggacggtttatttcatcaggcctatccatatgcagtgggtcatctatcaatcctctctgaatgtatgatatcagattgttggctactatgaatcctctaccgttaattgtaccttcacctgttattccgatattatcttgccgtacggcaaaaagtaaagctgttcgttgtatatactcatctttcttatagtctaaggcattatacgaacctaataagacagccccttgcgctaagtgtaaagtaacattggattttaaatatatggtgccggtcaaatagtttccggcatcaaaaatgagttttccccctcctgctgtatgaacataatcaattgcatattggatggtatgcgtgtttaaagttaccccatcaggttttgctccaaaatccattatagagtaatcttttccttggacaccagtccaatagaggaatagagtcaacaaagtatatagtaattttcttttcagcattgtatcaagatattattttttcatctttgcatataactcattcaaaatttcccttcgggtagaaattcccggttgaatttttatattcaatttagacaaacgcttccagttacttaaagtctgttcctctatcgcttcatctaattttgcttcccattcgggcaaaaagccccgaagtcccatgtattgtaccattaagaaatcttcgtcatctaatgaaacatctttataataaatcagagtagtgccttgtttaagcaagacatcttgcatcatagctatattgatattcctgacttttaccttttcttctattgcaactgaagatgctacaccggcagcttgtcccatagccatccagcatggttccattctaagtgtagagaaaccgatatgagagccggaaatgggaactggaaataataaattatctatttccttaggaacaatcactccataagggacagtgtaaggtgatgttggataacccagaaatccattcaggtgcaccataccgggttcccgtttatgggtggcatgtgaatcaaatccataatggctggctgtgatgcttgatgaatacacaggaggccttccaccgccttttacaggcatcgcatcacttgctatgaaaaaatgaagtccttcgaaccgacgtccttcacgtacatatacttgtctgggaaaatgcccattatcagtatattcatcttttgcatacccccattcgcgagctgctttccggaaatgaaccggtaattctttatcgttttgggcaaaccaaagcagtccttctgtatattctctcagtcttgtagcaaacttgtcacgccatgcccaaccggctgtaggccatgcccagttctcttcaggcagatctgatgagacaaaagcagcatgctggttgttagcatctgttttttcatttggaatttcaaccaggtttactactttaccaagcccccatttgtcaccaggaatcatagtcggattgcccttagctatatgtttcttattagcttctaacatttccaaagtaacattcaccatttctgcttgggtatgacgtcccgtccagacatcatcgataatagatgcatattcattacggtcataattttggggctttgttataggtactttattatccgaatttttggtcaggcacaatcggtagttgtatgcctggacagcattatctccaataaaagtggaagcatccatttccggaccatgccagtatttgtaaacacttcctgctccgggttctccaaactcatttttaccttcgcgccctactctaaaggggacaccggctgctgctgccagatctccctcgtaagtggcatcaatgaaaatcttgcctcgatactcttcttgagtattcttatcacgattcagaacgttgattttcacaattttatcatctactttttttatattatgaggactggaatcgaattgccgcattgtcaaaactgtgattagatctttatattctcctaaccagtctgtgaatacttgttctgccactgaaggttcgaaacggaaaccatcatcacatctctgatattgtatagaagttacaccatatttttttttgtaatagtctttgatgcggcaggtgaactctctgaataatcctgttgttgctgcccgggttacaatatccgttgctcccagtccattggagggcagacctcctatatgctgtgttcgttctaaaataacagaagttttcccaagtttagcagctgcgagtgctgtggtcaatccgccgggtgttcctcccactataacaatatcatatgtttgctgtgcaaaaatattgatactccaaaataatagtaaagttgttagtaattgtttcattgtaatttctatttagtgatattagtagattgatatatatgtatctgttgcttctttttccccggttcctggattttcattttactcatgctgacatgatgtgcatcgtccagtactatagctggtctataatctttttttcgggcaataaatgtaacattctctaaaataatccgctcaacatgtcgaagatagaggccccacgctggaagttccttgaaacatgaaaattcaggatatgaatcagccaattcaggaactctatctaattcttccggagtcataccaacttttgctatttccggttttcctgcacccggatgattgattaccacatttttcagtgtcacgtgtgttatgggatgcccttttagcccaatgatacttgccggagatatatttctaggcatatgttctatggggccttcatattcatagcctgcatccggttttccttcgggaatttctacatacaaattagaaataaggatagagtccattgttccgattttattcgaatgcgtacggttgcctattcgaagaaatatagcatttcctgtattataggcttgcagactatccactactatgtttcgggcgtatcctccatcgggagtagctattgttaatgccgaacgataagtatcataaatcttattgtttatgatccggatattttcatatcctccaactgtcatagtacctaattttatcccgttggcactcgaacgcatagtacaattacgaattactacattccggcatgcagtttcagttttatgggatttcaggcaaactgcatcatccgaagagtcaaagaaagaattctctatcaaaacattctggcaatcgacgatatcaataccatcattattccaatatgctttattgtcgactgtaatacctctgacccatagcgaatcgcattcttcatattcctgtgtccaatcacaggtgttttttatagtaatcccttctatagttatgcctcggcattgcttaaaatgaattcctcgcggtctacgcggtctgtcgttttccaaagggtctttgataaaacctttatgtacttggtcgattatgttgtatgatacttgacgcccttgtgcatcaattattccttttccataaatggctatatttttttggtttatagctcgaatcatactatagcaaggaccttccatattatagtcataagggtttagggaacctaccagcactgctccttcctttaattgtatcgctacgttcgatttgagttcaatgctacctgttaaataacggccgacattaaaaactaaaacacctcccccttctttgtgaatataattaataccagtctggatagagttggtgttcaatgttactccatcagactttatgccaaaaaaagatgcattatactctttactccacactaacgaaaaagacagggagaaaaggattgataatatgtatactttcataattaattaaatgattttgacggattatccgtcatgataaattctaaaatacctccgtctgtgatttcatgatgaaagattctaaaccgttttaattcttttccattcaaaaagactgcctttacatatttattttcttctgataagccttcggcacgaatgatgaaattctttccaccttccagacgtaatatcatctccttcagttgaggagcaccaataatatactctttactgataggatctacaggataaaatcccatagctgagaacaaataccatgcggacatctgcccacaatcgtcatttccgcacaaaccgtcggaaacgggcagataaaagtgatcaaagatttctcggataagtttttgggttttccagaattcccctgcatagttgtataggtaagctacatgatgactaggttcattcccatgggcatattgtcctatgagtccggtcacatcagatacaaaacctgtatttacagtattgttctcaagccagaagagtgaatcgagttttgctgtaaatgctttatttcctcccatcatctcaattaaagaatctacatcgtgttgcacatgccatacatattgccatgcatttccttcagtataatcccctccggaagttccggcatgtgatagtctgaaaggatcaaaaggttctctccatttgccctgtgagtccttcccgcgcattagtttggttaccggatcaaacagggatgtatatgcacgggctcttttggagaagaaattataatcttctttctttcctaattcttttgccatttgtgccacacaatagtcatcatagcaactctctaaagttctggaaactgattcttcaggaataaggtcgaaaggatagtatccatattgattgtaggtttcccaatcagacttcgggtgagattctaatgatgattttctgattgcttcataagctctctcaggatcaaaacctttatatcctttcagatatgcatctacaataacggggatggcatggttaccgatcatacaatgattttctttaccccataaagcccatatgggtaaataaccctgtgtatcacagtgagataacattgaattgacaaatccgttaactttctccggtactaaaagagtatataatggatgagctgcacgataagtatcccacaaggatagggtagaatagtattctcctatgggagagtagaggatgctgtcattaggacctctgtatcttccatccacatcagttatattattaggttggatacataaatggtaaatggaagtgtagaagtttactttttgttcttctgtgcctgatacgtctatccgtgacaacagattgttccaggcttcggcagattgagcctttactttttcaaagttccaatctggattttctttttctaatgctttctgtgcaccttctatgctgacagtagacagaccgacttttacttgaacattttctcctggttttaaatcaaatgaaagaagaaggcgtttggctttttctccttcttgaggttgaagttcttcaatatctatatagggtttgtcgaatttgataacatagaagaactctctttccacccacattttcaccttgttctttccgacgatgctatattggtctaacagttgcatttctgcatctattacatgagttcgcagctgctcattcttacttacgattccactttgaaggtctaccagaatatgtgccggttctgcttttctgaaagtataacgatgcatggccgtgcgttgtgtcgcagtcaattctacctccactccaaaatcagataaaactactgaatagtatcctggatgagctttttgatgttctttctcatatctacttttatatttttcattttgtatatcaccacaaaatggtagaatcaatatatctcctaagtcgggacatcccgtaccgttcaaatgattttgggaaaatcccatgatagagtcatcctcaatattaaagccggagcaatatctccacgaaccatttccactttccggacttacttgtatcattccaaatggtacgcaagctcctggaaatgtgtggccattatctgcattaccaataaagggatttacataacagcaataatcctcttttacattactacatcttatgctcagaaagcatactccaattatcgcaaatacccaccaaaaacattcctttcttttcatttaatttattttttaaatagtgactttataaaatcagtattatgtccccaatgtttattaggaagctttcctaactctagggtcaaatctccgccttgcatgatttcgtcatagcttaaccaacttctatttaaaactttaccgtttaaaattgctttttgaatatagatacactctgcatcagggcgatttacatggattttaaattcttgttgagacgttgggtgtaatgtaaccgtatcaaagaccggagcatttatccaataatagggtatacccgggcagacaggaaataatcctatggaagagagcacaaaccaagaggacatggttccggcatcatcatccatttctttcaagtacccttgtggagtggtattgaagattttgccgatataaggtttttcccacttttcatgtgtcccataataattagtggtcggttcaagtaatatttggtggactaacttttgcgttttccatggcgctccaaggtaataatataaaaatggaacatgtatatcaggttggtttcccatattgaataaattgttctcaaagaaataatctaattcactcaaaacctttttcttgctgcccaaagtcgcaataacccaatcgaagtcatgaggtacgaaccaacgatattgccatatagtaccttcgtacaaaccgtcaccatgcattatatctgaagttggaccaatgtccttaaatttttgtaaccatattggtctgtattcttttgagcgtaaagagaactctttttttaactctttattacccattttccctgcgagttcagaaactccccagaaatcatatcctcgttccaatgctttgtccggtgagtcattggagatatcttctgcctcttttagcatcagtggaagtagctcgtcgagagaaccatcaaacattcctttttgtaatgcatctaaaatcgtgataatagagtgttcagtacgtgttgtcagaaatggttctgcctttgttgcagaacgaggcttgccttgtttgtataattccgcaagtgaggagatcatgtgtttgtattccgtgggacaaacaatagataacagaggatattttgttcggtaggtatcccaaatagaccaaccatgataatagggtaactgctggcttttatatacttttccgtcacttcccttataactaccggaataatcattgattgtgaaaggggtctggcaggtatgatagagccgcgtataaaatgatgtttttaaatcttcatcagaagtttctacttgtatttgtcccaatagattttcccaggcaatacgtgcattggtgcgtatctgttcgaaagactgattcgagcacccttttttgagattcgcctcagcttcttctgcactgacagaggataatcctattttcagtataatttgttcattaggctctgtttgaaacttccatagtaattctgaatcgttatcttctggtttataagtagatttatctttttcaatataataataaaatttgtaactgcctaaatcacaagtgcaagcagaacgcacaaatccttttactgcattgtctcctataatgctatgttcttcggcaatatgcttaccataagaatgtttgaaatttatttttatgccggcggtctctgtagcaggataggtaaaacgatagatagctgcagtcctacctgtggttatttcaactttaagttgattatctaaagttacgctataatatccgggaattgcaatttctgacgccttatccatttttaaagtcttgcatgctgttccgacaaaaggtgttatcagcaggtttcctccgacgcctatacagcctactccagacattctggtctgtgagaatcctttcagctgttgtgattgataatcataacctccgtttccgcgaggtatagtttctggccccggtttaatcatcccgaacggaatggttgcggatggatcggtttgtccatgatcatcggaagtaccaatgaaaggatttacaaaagaggtttgctgagcttgaaccatagaaagggtcaagcataatacaaatattatactaaagtatctcatattgaatgttttataaatgaaagagggtttcaaaagaaacgcgaactcttaaaaccctcattttagaaaagtagaattaatcttttaatccaggaactatcaagagttcattgtctggtatcggaaaatagtagaattcttcgcttaatgttaaattgggatttaaagaaagctcggctgcatccctataattcttttgcaaatgaagaatctcatgtctttgcatagtaaagaaacgccccatacagctatgttccatacctgcggtttcccaccgtctctcgtccaaaacagctttttggaaatattctttagtgacatcctttgaaataagtggtactccagctctttcttgtactctccacatgcagtcaaatgctaaatcattaatactcttagttccataagcaactgcttctgcatacaatagtaagatatcagcatatctaaatatcattctggttttcccgcttgcgcttgaaattcctttggtttcataatacccgtcatcataattaaatacccagtctgaactttctatatttttcttccaataaggatgtttctgattggttgcgggatcatcccaatttagtaatggatagcgtcccgtttctgggttacgctcctgcccggtcatcgtcaccttggtcaggaaccaagcatccttgcgtattccttccggcatacttttaaagaattccaattcaaccatatagtcacaccatccgccggactcctctggtaattcgcttttgggcccagagaaatagtttttcgttttgttatggaactctccaaatactatttccttggagtaattagcttcaggttctttagtcaatgtacgtatgtccggttctaatatataaccatacgtatcttcgttttcaatgatttctttatactttgcagccgccttatcataatattccgctccttttttcaaaggccagcctgcttccgtcatgtaaacagaggctagtaaagcttttgcagcacctttgttaggagctacattaattccgttctgaaaatagggggctatcttatgattatccggcagcattctttctgctgttaatgcatccgattctattaattcatatattttattcacctctgcttttggggtattgtaatttatctcattctctgtgactagaggtatacgtccccaaatgcgtacaagcataaaatagtttaatgctcttaaaaagtaggcttgtcccagtctcggctccaggaaagatttctcaaccggtgttctttctgcattattaattacataattgcaagctttgattgtctgataatagagttgatacatttcaagaatatctgtatttcccgagttgaaattaaaccggtcatattccgaaaaacgtgacttattaccaccactatgggctgttacatcatctgcacaccacacataaatggctctgaagacgcgagcattagtctggtaatatttgttgtacatcccagttatagccatatccaagtcttccggacttgagaagaaagaggaaggggtaagtttaccacgagggtcttcttccaggaaattgtcacaagaacataaagcaaataataatatgctataaatcaatatttttttcattttgcatctattttattggttaaactaaaatgagaatccaagccccaaagtaaatgttcttggtaatgggtatgaaccgccatcaacgcctgcgttaatgtcactattgccgccattgcttgtgatatccatagttccttccggatcatatcctgtgtaagacgtgatcgtaaacaggttttgagcactcagggagattctgatatctgcaaattttgtttttgctctggggattgtatatgcaatacttatattctttaatcttagataatcagctttttccaaatattgagcagtttcaaatctggaattgattgtcgaactgaacgggtttggtattttagtattttgattttcgggtgtccatctgttataataaccttctttagaggtgataaaacgtgaatcactgacacattcattggtgagatagcgtgataaattcaaacggtcagctcccagtgaaccttgaaagaataaattaaaatctaaattcttccatttgatggtattattccatcctaatattacatcaggaaatgcttgtccgataatatctgcgtcatcagattccaatttgtaattcacatttttctccttaaatttgttatctcctggcttttgcccccatttggctgcctcttcggcctcgtcagtacgccataaaccttcccaaatatatccatagatactacctaatggttttcctacttgcaatacggccgtattgagagaagcttggtctaattttgttcccggatgtaatcttgtttcatctcctaagctgacaacttcattttttgagtaggatacattaaatgtgctttcccatattaaatttttgttttgaataggaattccggttaaagagaattcaatacctctgtttttcacttcaccaagatttacccaagtggttcctccgccatcatagtatggtataggtttctttagtaacaacccggttgtattcttttgatatagatcgatatttgccagaattctattatttgcaaatgccatatctaagcctaaatcatattgagtagttttttcccatgtcagattaggagtggcaggtccggaaactccgtatccgggataatcacttgtacctccccaaccatacttcgactcagctagaagccctaaggttgaataggctccaatggcttggttacctgtattgccccaactcattcttaactttaagacatcaaaaatattgagattctttataaaagattcttctgacattctccaggcaacggcaactgatggaaaatttccccatttattcttaccttggaatttggaagaaccatctcgtctaatagtcgcagtaagtaagtatctatctttgaattgatacattgcacgtcccataagtgaaactaacgaagagcgtgaaaatgaattgctaaacagattcatatctcccaaactcaaattccaaaaatcaacagattctgttctcaggttagctacttcattagacaatcctgtagttgttgattgtgataattctatggctcccataagattcaacttatgttctttccattctcttgcataatttatttgatttacattataccagtcaaaactatcgttttgattattatttgcagaattgttttgagctcgtaaatcctttgcattcgacttcatccaacgattcttgtaatctttataatgggcagcaccttggaaattcaaactcaacccttttactggtaattgtaccataaactgtaaatttgctgctagataattagtgtaactttcatccaaatcttgagttaatcggccataagggttatcttttgttgaattgatattatctctcaaccagtttccttcttcatcttttaatttcaaggtaggactataggtaattgcatctgctataatagttccgactcctccacggggaccatttttatttgtttttcgtcttactgcatttacgtctaagttcattttcaaccaattagttacatcagcagttatattagaccgtaaactgaatttctgacttttcgattccttcaaaatgccttctatgtccatcatattcatagataccaaatattgaagtttcggaatacctcctgaaatagagagtttataattttgagtatgagctgttctgaacattagatcttgccagtctgtacccccattttttttccactgagtgatttcatccggagaaaagaaatcttgattagcccccttttcccgacgatactcattatagaattctgcatattcacttgcacttaatagatctagctttttggcaatggtagatattgattgttctgtttccaagtgaatatttgtcttaccttcagcccctcttttggtagtgaccagtattactccgtttgcaccgcgagaaccataaatagcagttgccgaagcgtctttcaggacctctatcgattgtatgtcattaggagccagattgttaaataaatcggtattaggtaccccatctacaatataaagtggtgaatttccaccataaatagaatttgcaccacgtatacgaatttgggtactctgctccggtgcaccggagtttgttataacaacgacgccgggaattcttccgcttaaagcttgatccagtcgagtcattggctggtcctttatatttttctgtgaaatggaagaaactgaacctgtcaagtctgacttcttcacagttccatagccaattacaaccacttcatcaagcatttccatatcttcttgtaaaacaattgtgatatgtttgtttgcaactttggtggtttgagttttgtagccaatgaatgaaacctgaagggtatttcctagtgaagcttggatggtaaacttgccatctatatctgtaattgtacctattgatttgcctataacactgacatttgcacctataatcggctctccttttacatcagtcactattcctgttattttttcttgttgtatctgatctaataagctggtatttttcgataaaataatataatcgttttcgaatttatagccaatacctactttcgccaatgtctctttcaaatatgaagataccttagcagatttattttgtataatgacctgccggttggtatctatttcgcgattgctatatacaactaagtaatctgtctgcttttctatctcttctattaactgacctacagatatagaattagaaggaaaggttatgactgcgttttgtgcttctgtatttactgccagtaattggagggcacaagcaaatagcaagaataaagagattttcataattctaaaataatctttaaagctttgattttggacaataaagagtgataacaaaggatttattttcatatctttgtatttagagtgaatactaaaattttttccggtgtttactttctacaggcgacaggtggtggtgcacttgtcgcctttttgattataattctatgttttcatgtggataatgtattaagggttaaacaattgtattactttaaggtgatcacgttattttctttgtctatttcaattttgaaatgatgtatcttttgaatggtatgtagtattttctctattccatctctttgacggaatttacatgtataatttatatctttcaatttgggatttgcaatattgattgtgacatcataatatagctccaatttgttaacaatgtcagccaagcgttcattattaaagctgtagatgccatttctccataataacatatcaggattttttatattgctgactgtcaatttcccgtcttgtgcaatgctttcttcattgggccttaatataacttgcttactcttgtagaacacttgaacggcaccttcaatcagacttgtcctgatttgtttgctatccggatagctatatacattgaattttgttcctaatacttgtattttcgcatcttgagccgctacgatgaaaggtctgtttttgtctttagctacttcaaaaaaggcttcgcctataatggaaacagttctttcctttccataaaaatgcgaggggtaggtcaaggtcgattgagcatttaaccagaccacggtaccatcttgcaaagatatacaagcacgttgcccggctggtacatataaagtattggtttgcacttggaagtcatcttgtagcttatgtgacatctgccaaatagatagctgatatgtgcttatcattaaaatgagtattgcagctgcatatttcattgttttcaccagccaaatacgcatttttttgctttttatccgtttttggaaatgctgatagcttgtttttccctctttcttatcttctgtgtgtgaggataagttcagtaatgcctggatattctgatactcggcaaactgcttttttagctcctcatttttctctatttcacgaagaagtagcaacctctcattgggtgctaggctgttttggaaatattttaatatacgttcatccatctttttatgacttaattcatagtatagacgaatgtagaaaaagaatccgctaaaagaaaatcactttttttgttcaggttacaaataatacagaaagataaaaagaggaaaatagtcttttagttcgtttcgtagctttttataggcaattcccatctgagtttcaaccgtattaattgaaatgttcatctcttctgctatttccttttgctttttgccctctatcttacttttcaaaaatatctctctacatctttcaggcagcgaatctattactttagagagcaattgttctacatcatctttttcaaaaatcccttcatctaattctcctaaagaataatatttcatttgtaaggtcaatctatattcttcctgcattttattttctacttctttctgcactattttgtgccgtagaaagtcaatgcaacggttttttatagaagtgaataaataggccagaatattgataggtagtggcaatagttctttcttttcccaaaaatcgaggaaaacatcttgtactatattctctgcatcttcatccgataagacatattctcgggcaaaacgtttcattttcgagaaataagaaagataaatctgttcaaaatcaatatgttgtttctctagtatcacctttcattttttagattatgggagcaaatataataagtttagaatgataagcaactcataaaatgagttttttctcttattatactttttaggagtaaattcggggcagtagaaatttagtggggattatcgtttcctattctcacccaaaattccgacctttgcctcatggaaacaaatcaattggaggtgttggctcgcatcgtgcttccctctgaaatcctcaactacttttcagttgtcggcgttgaacagacctcaacagaaatacatattcatcttgatgaactgatgaatcctgcattatcccatgatgtacactttgaatccaagggcttcatggaaacagtaagtatcacggactttcccatccgtgaccataaggtcctcctgaagatccgccgtcgtcgctggaccgatacgcgcacaggcaagagtttcagtatccctatcaaccttgatgtcgtttgtaaaggtacccgttattccaaggaatttggtgcttttttaaaagaaacgtatggagacgtcccctgtgacctgccgtacgcttgaggaattctaccatatagatggacatactttcgagaaacagtacaaggaaacactcagtggtttcaggaattgggagcagttggagcatgcggatgaatggattttattcccggagaacatcggtccgcatttggctatagatgagtcgtctctgtctaatggagaattatacacttttgtcaccaaccgtgaccggcatacacatgaggaaagccttgtggcagctgtcgcaggcaccaaatcggaggatgtcatacaggtgctcaaacaaataaacgagaaagcccgtgaagctgtggaggaagtgacccttgacctgtccgattccatgcgcaggattgtcaccattgccttccccaaggccaaacgcgtcatagatcgttttcatatacagaaactcgcctgtgatgctgtacaggaaatccgcgtagcccatcgttgggacgccttacagcagagcaatgaagaaatggaggagtgtaaacaagcgggaaagtcatacatgccttaccgattcccaaacggagacacccgcccggaactgctggtcagaagcagatacctcttgtttaaatccgcggaaaagtggacggaaaaacaaaaggaaagggctgaaatactgtttaaggaatatcctgatatacaaatggcttatgggctctcacattcattaaggatgatatttgcaaaaaacaccattaaggacgctgcaaggctaagcatggctcgatggtataataaagtggatgagtcaaggataaaatctttcaatgtcattgcggctacattctacgaacactatgatgatattctaaacttctacaacaacagggcatcaaacgcggcagccgaatctttcaacgccaagattaaactctttagggcaaatttacatggagtggcagacagaaagttttttctttttaggctggcaaagatatatggatatccccactaaatttctactgccccgtaaattctaatttgcttggttcggtgaaacaatagtgaaacaactgcatcaatttaaggctaaaactactaaaacaacggacttataactggaggggtattacaaagaaaaaaggctgtattcccttaggaatcagcctttttctttgtggaccagcctgggcttgaaccagggacctccagattatgagtctgttgctctaaccaactgagctacaagtccggtgttatcctcatcggatagcgggcacaaaaatagtatattcagttgaaatatgcaaacctttcgggcaaaatatactgtttgttgctttgtttttagaacttatacgtacgtttggggttcttggggaaccaacctttctttacgcggtcttcttgttcaaagacctccttgatggtccagaacgaagagaaagcaaatacgcccaagagggacgcaatcaagatattctctacgcaaagcgaggccacaacgcccccgatgcccaatacaagaaaaatccaccagcacttggtaccccaataatactcggctttcactaccacaggatgaaacaatccgatgataagaaatgtacaaatgccgatgaacagtcccgaaagatgatattcgtttaagaattccataaattatctgttatttctccgggcaaataggaatttccttcttgatactttgctccagtgaaatcaacgtttcggtagcggttacacccggaatttcttgcattttgttattcagcaagtccatcagatgctcgttatcgcgtgcatatactttcgtcagcatcgtgtaaggacccgtagtgaagtggcattccacgatttccggtattttctccatttcggcaaccactgatttgtacatggaacctttctctaacttgatacctacatacgtgcaggttctgtagcccagagatttggggttcacatgataaccggagccgacaatgacgcctaaatctatcaaacgttgcacacgttgatgaatggcagcacgtgatacgccacactcagcagctacatctttgaaaggaatgcgggcattctgagagatgatttccagaatctgccggtcaagattgtctattttttccataatatcaatttgtgtaagttcttgtttttatcaaatagtaagcaaatataggactttattttaatttctctatataaaaggaggaaaaaatagggaaagagtaaaaaagaagcgggcgaagcagatgtttttgtttacatccgtttcgcccgctaagtctgtaccgttgaagaaaaaatcttcggctgatacttatttttcgatgccgacgagctctacttcaaagatcagggtagagaacggtttgatctgaccgccggtttctctgccaccgtaacccagttcctgcggaatataaagttcccacttagaacctacaggcatcattgtgagggcttctgtccagcctttgataacttggttggcacggaaagtagcaggttcgttgcgcttgtaagaactgtcgaattcagtaccgtcaatcaaagtacccttgtagtttactttcactttgctggtgtcagcagggattgcgcctgtacccttggtgatgattttgtattgcagaccgctcggagtggttacaacaccttctttacctttgttttcagcgaggtatttttcaccggcagctttgttgtcagcgtatttgacagctgaagctttttccttgatggcttccataccgtcgcgcatgtaagctgtagcagcttctttagtcataacgttgctcttgtctgtgatacctgcgatgaaacctgccaacaggttttcacggctgatagtttgagtagagtcgccaccgaagatttgttggttgaagccttctacccattgtttgcctaccatctggccaatttgcataccggtcatgtaagcaacgtctttcttgctggttttagcagcgccttcgttgaaacctttgatgaattcagccatctgagtagtgtcaacgccttgttgcatcaggtactgagtcagaccttctgtacgagccataccgatggcataagacaatgagtcaacatctgttttcagatttgctttcgggctttgtgcagtacaggaagctaaacctgcgcctactgcaagagccatgataaatgttacttttttcattttgcttttactgtttatttttatttttgggataatatttcgagtaattctacttcaaaaatcaatgtgctgtgaggcggtatcatttcgcccgcaccttgtgcgccataggcaagatcggagggaatataaagtttccacttggcaccttcgggcatcaactgaagcgcttccacccagccggggataacctggttcacaccgaatacggcgggttgtccgcgtttgatagaactgtcgaacagggttccgtcaatcagtgtgccttcgtagtggcatttcacttggtcggtggcttttgcataagtgcctaccttgccttcgttgatgacttcgtattgcagaccgcttggcaaagtaatcacattaggacgtttcttgttttcttccaggaactgtacgccttgctctatgctggctgcattcattttctcttccagttctgcgaagtatttgtttactatatcgcgtgcctctgcgtgtgagatggcggttttgtttccttccagtatgtctttgatagcttgtgcaaagtcatctacttcgatgcctttggcacccatacttaataaattttgacctattccgaggccgatagcgtaactgaatttatccatatatctttggggttgagactgaaagtattatctctttcaatcagttgcaaaattacaagtcgcaaaagtaagtgttttatttgaatgatttatgcttttaggttttaaattttcttatatctgtggcaacttcggcaatcttctgtatttttgtagaaaagaaactgctataatagaaaggagattttggtatgaagaagaatttagtgattttatccggtgccggtatgagtgccgagagtggtatcagtacgtttcgggacgcaggcggattgtgggataaatatccggtgatgcaggtagccagtgccgaaggatatgtgcgcgatccggagctggtgataaacttttataacgagcgccgtaagcagttgcttgatgtggagcccaatgcagggcacatcggacttgccgagctggagaaggacttcaacgtgacggtggttacgcagaatgtggataatctgcacgagcgtgccgggagcacgcgcatcattcatctgcatggtgaactgacgaaggtgtgttccagtcgtgacccttataatcctcgctatgtaaaggagttgaaaccggaagaatatgaggtgaagatgggtgacaaggcgggcgacggttcgcagttgcgtccgtttattgtttggtttggtgaggcggtgccggagatagaaacggctgtcgactatgtagagaaagcggatatctttgtgattataggtacttcgatgaatgtatatccggcagcgggactgctgaactatgtgcctagaacggcagaagtatatctgattgatccgaaaccggtggatacgcactcaatgaggcagatacatatcattcagaagggtgcttcggaaggagtgaaggagctgaagaaactattgtctgtttgatgctatcagtttctccatttggaactgttagtttcatgccgtgaaacttcctgtttcaataggtgaaaccaacagtttcatgccttgaaactgtgagtttcacggcatgaaactaaaacttgaatgcggggttgcggattacttgccgtaaggtgttgaaagccaggtactatttcttcagcagcagacggaatacaaaccatgcatggtgcgccacggtacttatcagtccatagtgcttcgccatgatgcggaagcgttcccgcagggaagccttttggttctgtgtcgtcataccttcttccagataatcgataagcgtgagatgcgtgttatgcagcgtccgcgcttttttcatgatgcggatgcaccagtcgaagtcggccgagaagcggtattgcatatcgtatggtactgccaggctccgtttggcgaagaatgcctgatggcaaacgagcataccttgcctgaaactcttccatgtcagcacttcgggggcggagaggcggcgcatacgtaggaaatgcctttctttatctactaaagcggtttcgccatatagtacgtccggcagttcgccgattcctaaagtatgcaccatttgttgcagggtgtcgtcttcatggaaactgtctccggcattcaggaaacagaggtagtcgcccgttgccaggtggatgcctttgttcatggcatcatacagtcctttgtccggttcgctgacaagcagggtgatacggtcgcgatacctttcggcaatggcgagggtgcggtctttggatgcgccgtctatgatgatgtactctacgtggtggtaggtttgtgagataacgctctgtatcgtgtcttccaatacggcctcggcattgtaggtcacggtgatgatgctgaacttgggtgtgggacggttatgcatgtcttccggttattttgttataaacgtcgatgtatctcttggcaatggcactttccgaataattggaaacggctttccggcaggcttgctcggagagggtggtatattcgggctcggtcagtatccagtagatgccgttggcaaaatcctcggctgatttgtattgtgccacgtagccgttgtgcagatggtctatcatctccggtatgccgcctacgttgaatcctacgcaaggtataccgcaggacatggcttccataatggtgttcggcaagttctcttccagcgatgaggtgacaaagaggtcgacggcgttgtagatatctaccaactgatgttcattgctgacgaagtcgagcggataaaccttaaaaggcaacatattctgtaactgttgcgactggttgccaaaggccactacacccagttggtctttcagttccggatgcttctctgccaagagtttgcaggctttaatcatgtattccactcccttccgggtatccattatcttcaccgaaccgaacagaaccagtttgctgtcctgcggaagcctgcatttctcccgtgcggcttttttgctgtgcggcttgaagagattggtgttgatagggttggggatactggtaatggcatgtccgctgaaaagggcactcttccgggcgcgttcttccagccagtggctacaggctacaaagttgatatgacggccctcatataacttttgctttttgaggaagatgcggtgggagaggtctttcttccggcttccgttgtggatgaaggggcaatgatggcactcctcttcgtaatgcgtacatccgccggagtagtggcagatgccggtacagggccacatatcgtgcatggtccagactacgggcttgcccgaagccagaattttctcgatgttctttaaagaaagcatcccctggttgatccagtggagatgtatgatgtccgcttgctgaaactccggcaagttggtgatgtccgtgccggcgttggcaatgtctacggcgaagaggtggtttctgttgaaatggttggctttccagataacgattcgctcccatacgaacttccataccatgcgcaggttgtggggcaactccactacggtgatctgttcggtctgtttgtcgcgcactaatagcttggctttgatgccgttattcttgagggcttccatgaggcggcttgcggctacggcggggccgcctatcttttctgttgtattgataagtagtattctcattgtgttacctttcttctgattaagttttggtagagattgagatattgctttgcaacgacttcaccggagtatttcctgaatacttcgcttcgcatattttctttggagatggctgtccgggcttcggatattccccatcggatgccttctgccaggctgtcggcagagaggtagtcggccaggaagccgttctctttgtggcggataatgtcggcctgtccgctgttgccgaaagaaaccggaatgcaaccacaggcttgggcctcgatcagagtctgaccgaatgtctcatagaaagaggcggatacggtgacgtctgcggcggaatatagttgcgagagtttgtttgtatcgcctattcgtcccagataggtgtagctgacggggatggagttgagaagtttctccggatatttgatcttgccgaatagtgccaggtgaagtttttcctgcgggaattgcttcttttcaatcaataaccggatggcctggagcagatattccactcccttgatcggatcgtcgatgcgggcggctccgaacagaatgatatgtttatcgggcagggacagttcctttcgggacagctctttgtccatcatccggaagtcggtgggcgagagtgtattagggatcacggatacaggtttctctttaagtagggtgctttgctgtatttgtgaggaaagccatgtgctgactgcgacgatattcagggggctggcatgactgaatagtttttgtttctttttgaatacccggtgcgccagatcgttgttgcctgggaagcgcaggaagcggcagtttctgcattcgcttttgaagagggtgcaggtatgggcatggtggcagatggcggtacattcccacatatcgtgcagggtccagacaacgggcttgcccgattcgaagatttcctgtatattgttcagtgaaagcattccctggtttatccagtggaggtgtatgatgtcggcttcccggaaggcaggcagtttggtgacgttgaagcctgtattggctatggagacagtaaagagattcttccggctgaagagattattcgtccagataaccagtctttcccagagaaaagtgcatttcttttgccagtctttgcctacagggatcacctgttccgattggctttccttgtgcaggacgagcatcttcacgtctgttcccgctgtatggagcgattccatcaggcgtctggcggcaatggcggctccgcctgttttctcggacgtattgattataagtactctcatgttgcggaatgttttggcaaaagtacagcttttaccgctttctatccacaaattcgcggtttttttagccagtaaccgctaaagtatctatctttgcaggagaataaattagctacaagttacaggctacgagctacgagtggctgcgttgtgattggaggggaaagattctgtttgtaagtgttcaagaggatgattacgggacacaagtgtttgatttgtaccgtgcaagtgttgtggaaatgtattgcaggtgttacgtaaatgtattgcaagtgttgcaaatgaaccgaataagcgttgtgaatctgccgtttaaatgatgccacatggtagggcgaataattgttcgcaggtagtctgaaagtacttggtatttgtagttcataactatagctcgtaacttttataacaatatgggagaaaaaggtttgaaatggttggaacagctttggcagtgcttcctcagtatagtgaaaatcctgttgcagtccaagtggcgcacgcgcttgccgtcttctttcagtaatccggatgaattgctgatattggctaacggcccttcgctgaaccgcacggtagaagattcgacggatttcatcaagggaaaaaccttgttggcagtgaacttctgtgtaagttctcctatgttcgagcgtctccgccccgaactttatctgattgcagatccgctgttctggatcgttcccgagaagcgtatacagcttttcaagacaatggccgagaagactacctgggatatgaacttctttgtccctgcccgtgccctgaagaataaagaatggcaacccttactggcgggtaacccccacatcaagctctatgtttataatacaacgcctatcgaaggtttccagggtttctgcaactggatattccgcaaaggctggggcgttccccgtccgcataacgtgctgataccttctatcgctatgggattgcgcctgcctttcaagaaaatctatttggcaggtgctgaccattcctggttgccggagatcaccgtgacggacgacaacgtagtactgatgcaccaaaagcacttctacgaccagaataaatcgcaggccgaaaccgtgaaacaggaaaacttgaacagtgcccggctccacattattctctatcacatgcacgtagccttcaagtcctattttatactcgaagcctacgcacgccggctgggtaaggaaattatcaatgtcactcccggctcttatatcgacgcttttaaacggatgaaattatgaaagatggaataatcattcaggcacgcaccggttctacccggctgcacaacaagattctgctccccttctatggcgaacagcgcatcatcgacattctgatagccaatatcaaacaggcttgtccggacaaatgtattgtacttgccaccaccaatcgcccgcaggacgacgtgcttgccgaaaccgcccgtcaggcgggtatcctcagttttcgtggcgacgaggacaatgtactcgaccgctttatccgtgctgccgaagttttcggtatcaaccgctttatccgtgtttgttcggataatccgttccttcgtcccgaaactttcaataccttctttgccgaacacaatttctgtccggcagattatatcgcctatggctttgctgatgggcgtcctaccatcaaatcccatttgggcttatattccgagttgacaacgattgacgctctgcgtcgtgccgccgtttctacgcaagagaaactttacatcgagcatgtcactatctatctctatacgcatcccgaaaaattcaaggtgcgtctgcttccgttgccggctgagttggaagggcgtttcgatcttcgtttcactctcgatacgatggaagacttcaccttgctacaggaactttatgccaccttccatgagaagaccgaccgtagtgtgcatgccctgttgcaactggtgcaatcgcatcccgactatcgtgccagaatgttggagaatattgcaagaaatgaaaaatagctcatgtataccttctaccgtcgtgcagccaagtgtaattcgtaatttataattcgtaaatgaatagtacttatataataggagaaatcggacagaaccataacggttccgtcgatatagccaaactgatcgtagacctggtgtcccgccctgttcgtgaagaagtgttcaatatagaacttcgtccgatggatgcggtgaaattgactaaacgggatttgaatgaagaactgacggactcacagatgaaccgtccgtatgattctccccattctttcggacgtacctatggcgaacatcgtgcttttctggagctgacggacgaggaacacttcgaagtgtataggcacgccaagtctttagggcttgatttcgtggaaacactttgctccaaaggctgcctctctttgctgaaactcttcacgcccgaccgtctgaaagtggcaagccgcgatcttaccaacctgccgttgctggaagtgatggctgaaaccaagatacccattattctgtctaccggcatggcaggcagaaaagaactggatgatgctttggaggtgattacccgttatcataacaacatatctatcttgcattgtgtatcccagtatcctacccagcctgataatctgaatctgaagactatcacctatctgaaacagcattacgggcagtattgcatcggcttctccgaccacaccatcggtattgccgctcctatcgttgccgtgggtatgggtgcggaaatcatagagaagcatgtcaccatcgaccgccgtatgaagggaaccgatcagcaaggttctcttggccccgacggtgtgaaccgcatgatacgtgatatccgtattgccgaacgttggctgggaaaagaagaactgtatatcgactcttccgttgcctcggcaaaggtgaaactggagcgttccattgcaacgaataagacgctgcatcccggagatatcattaccgaacaggatatccatctgttgagtcccggtgacggctttaagtgggtggagcgtgcgaaagtggtagggcataaagtactgaaagaaattccccggaatgagattatctatccggatgtcatccgataatttatgaaactcttaggcatagtcatcttatattatccggatgattcggtagtaaagaatatcgctacctatcttgctcaactggatgaattgatgttgtgggataatactccggcaacagatcgcagggatctggatttggattctttgggaggcgggagagggaaaatcattctggatggttgcggtgaaaatctgggcattggctctgcgctgaataaggcggtggtgtatgcccgtgcaaatggatttacgcatctgctgaccttggatcaggatagctgtttcggtgggcggaacttcgaaaactaccttcgggcaatccgtaactatggtgaggacaaggctgccattttctctaccaattatttcattaaatcccagcaaaccaccatgtatccgccaacggactctgtggatgaagtgtattcggcaatgacttcgggaagtatatatccggttagcctgttcgatactttgggcgactttatggaatccctctttgtctggggagtggattgtgagttttgttggagggctaaaaggaaagatattcccgttttatgtttcaagaatattctgctgacacacgatttgggttatcagaagaagaaaaggcatttgctgggaaaagaagtatttcctaatgaatacggtccggcccgttcctactataatgtgcgcaatggtattctcctgcatcgtctgtatcctgaagcgttgaatttgaagtcgcatttgcgctatcatttttataagcgtgtggtttttatcgtactgtatgagcagcagaagttcagtaagttgtgggcattgctgtgtggctatcgcgatgggctgagggggaagagcgggaagtggaaataaatgattgtatcatctgaataaaaagaaaaaactatgttaccaaagttagtgattactgatattgatggtgtgtggactgatggtggaatgtactataccgaacagggcgatgtgatgaaacgtttctccgtgaaagacggctggggagttattttccttcgcaagctgaatatacctgtagccattatgacgggtgagaatacgcagattgttcagaagcgtgctgataaactgaagatagattactgctacctgggggtgaaagataaagtggcacaggcggaagaattatgtcgtgagttgggcattacgttgcaggatgttgccttcatcggtgatgatgtgaacgacttggctctgctccgtaaggttggattcagcgcttcccccagtaatacaccggattatgtgaaacgtgaggttgattacgtcaccgcacagcatgggggctttggtgcctttcgtgagtttgtggagaaactgctttctgataatgggatgcttgaaggagtgcttcagcagtttctatcctgaggttttttccctactttgtagaccttgatttcccggaaagaggtaggtgtcgtataagtacctattacaatggaaacagttttatttgtcatttttgcgtgtctttaagattgttcaatagctttgataatttcttctttttccggtgtggagaatgtacaggggtagctttgcataccttgtaccgctttcaatcctttctgagtatatctccagtcagccagcctgtttacccaacgtaacaggggatgcttatgagtgaattccataatcttccttttgccagagatttcggcagtgtctttaggcatatcgctgatgctgcaaataaaggagaaagcatcttcaagcgtatcaccttcctgggctgccagtaattctgataacgccagaaggaaaccttgatattcctcccgatatttatgagaggttttgataactgaaacaggtacggtggtttccgtggcggaacctctgatacgctcgcgggcactgtagaaatagggtagtgtagcatatttgccgaagataagcgcagcatggttaaagaactcttcagccaggaaaaggttgcggaaacgcaggcttccgtccgggttgaaacaagctgcatacatcctctgaaaagcttgtgtccggatgacggagtagagcaatgaggcatacatgttcttctcttgcaaaagtctttcccggggagtatcgcccgttacttgtttatcgaagtagcggatatagcgagggtagaatgatattttccctttatggggagtgaaggtcaggtaatgtccctgtgcagtgctgtaatctgggtgttcgtctagaaaggcggtcatctgcgcaatgccggagggaacagcgaaatcatcatcagcgcaataaagcacatagggtgtactaatcatgggaagcacttctttcagcttcaacaggaaatgtagtttaggacggtgcagataagtgatgtccgggtacttctccgcatcggcaaacggatggtcggatgagtcgggaacaagaaccttgatatctgtgcggctatagtagtcgagcaatctgcgcaagcgctcgggacggttgtgcgcagggatgattacagttacattttgcagtgtcattattgtatggttttctttttaaatagatattgaagactttccctgaatacggtcgacttcaggctccacatcaggaatatgtagagtgaggcagctaaagcgattttcaccagtaaggaaagatagatgttcttcacataacctgctacccagtaagtaaaagtcattacggctacagatataatgagatagggagctatatccttcagtgtattaagcagggaaattccgatatgtttatgagcaaaataatgccagatgagtagccagaagatattggctgctgtatagactatcagcatgatattcagaccgtacgggtaactaccccacacgcataatagctggaagatgcccagtgcgatggtgttccacatatatacgttcggccggccgatgctattcatcaggttggagtaaagagttgaaataggcatgaaggctccccatacgcacagtatctgcatgacgggtacacagggtagccatttctctgtaatgcttattacgatcagttcctgagaaacaatggcaagccccaacatagcggggaaactgacaaaggcggtgaagcgcatcagcttgcggaatatgttttgcaatcgttgcctgtcctccgaggcttccctgaacacaggttgccctacactgtttatcattccgaaaatggtggaatatcccatcgtcgtccacttgcttccctgtgagtagtaaccggcttgctggatggtgtagaaacgtcccagcaatgcggagaagatgttgttattgatatgagtgaagagcgaggtaaagagtaatttactgctgaaaggcaataattccagcaatgggtgaaagcggaacgaaaaagtaggccgccagggagagaatatccaaagcaggatagtgttggtgctgacatacacaacggtctgtacggcaattccccagtatccccagccatggtaggcacaactgacacctgtaatacccgaaatgaggatggcggctatctgtatctgactacgctctttcaccatgagattacggaaaaaataggccgtaggggcagtaccgaaacttccgatgaagaaactcagaaattggaaacgggccagccgggtaagctcgggtgtatggtagaaatcggcgatgaaaggagcgcaaagaaaaagtatgaggtaaagtgatgcgccgatactgatgttgaaccagaatacggaattatattcctcatgctttacctctttcttattgacaagtgccaggatgaagccactctccgagaaaattccggccatggcggagaagatggtcaatacggccaccatgccatagtctgttgtggataacaaccgagcaaggaatatgccgaagacgaggtttagcagttgcatggcgccgttgcctattccgccccagaataatccttttgctgttttctctttgagtgatgcttctgtcattccttgttcaatttatgattaagatatcatttaattgcgtttaaattatccgcattaagaaaccaatccgagtgtatgcctttagatacatttctaatcttatcctgcttcctcagtttggtaagtaggtttctgacttttgagtgtttttggctttcgctcaatacatctggcaacttattccaaagtaattctgttatttccttttttgtaagcgtaccgtgttcagtgagtgcttttaaaattaaatcacaataataactgtcctcaaatcctttattgttgaaataggctgttttctgatctaattgctgagcaaccggttttgctataaataggttcggctttctttcttcaataagcttttgatagtgattcgccatcgcgcccataatagtatcctttataagaagtcgggattcctttaggaactgccggaatttgaaacatgataactcttttcccttgatacatgatttcatgtatttccgtaaaagtaatgccacagttggtcccttcggctatttctctttttagggcgtcaagcgagggacgtgtcggtttatatgagctgcctaaaacagcgtgagtcttatcatgaatgccgaataacaaccacgcaaattcttcctggccaagattggcttcgttgctacgtgcagatatgagttcttgagttgtcattcggcattaagattatttttacttcacttcgctacccggcttcacctccttcatggttgtaactacggagagtgaaccgtcaaagttctcggcagagaggatcataccttcgctgacgatgcctttcaacttacgcggagcaagattggcaatgaaacatacttgtttgcctaccaattcttccggattgtagtgttgtgcgataccactgacgatagtacggttttccagtccgtcggcaatcttgaattgcagtaatttatcggctttgggaactttctgacattccaatacggtgcccacgcgaatatccagcttcatgaagtcgtcgaattcgatattcgggcggataggattggctttgtagttggcttcctcattagcctttttcgtatcgagcaacttctgtacctgtgcttcaataacgctgtcttctatcttttcgaaaagcaattcaggagtagccaactggtgtccggccggcaataaattagtgctgcccaaagtagcccagtcgaagctgtccatgttcagcatattgcgtagtttttcgctgctgaacggtaggaatggttcgaatgcaatggcaagattggcaaccagttgcagggagatgttcaggatagtggctacacgatccatatccgttttggcaatcttccagggttcggtatctgccagatatttgtttccgatgcgggccaggttcatggcttccttctgtgcatcacggaacttgaatacatccagtaacttttctacttctgcttttacatcagagaattcttttagtgtttcgcggtcgtactctgtcaattcaccggcagcgggtactacaccatcgaaatacttcttggtgagttgcagggcacggttcacaaaattaccgtaaacggctaccaattcattgttattgcgtgcctggaaatctttccaggtgaaatcattgtctttagtttcaggcgcattggctgtcagcacatagcgaagcacatcctgcttgccggggaagtctaccaggtattcgtgcaaccatacggcccaattgcgtgaagtcgaaatcttgtcgccttccagattcaggaattcattgctcggtacgttatcaggtagaataaagcttccttctgctttcagcatggcagggaatacgatgcagtggaatacgatattgtctttaccgataaagtgaatcaggcgggtttcgggatctttccaccaggtttcccaagtgtcaggcagcaactcttttgtgttgctgatgtagccgataggggcatcaaaccatacatacagcacctttccttctgctccttctacgggtacaggaataccccaatcaaggtcacggcttactgcacggggttgcagacccatgtcaagccagcttttacactgaccgtatacattgggacgccattctttatgatcttccagaatccattggcgcaaccagctttcatgttggtcaagcggcaaataccaatgcttcgtttcgcgcattacgggcttacttccgctgatggcgcttttcggattaatcaggtctgtggggctgaggctcgtaccgcacttttcgcattggtcaccgtaggcaccttctgcatggcagtggggacattcgcctgtgatatagcggtcggcaaggaaagtcttggcttcctcgtcgtaatactgcatacttgttttttcgataaaatcgcctttatcgtacagcttacggaagaattccgaagcggtgtcgtgatgagtttttgaacttgtgcggctgtatacatcaaatgagatgccgaactctttaaaagactctttgataagcgtatgataacggtctactatatcttgcggtgttacgccttctttcttggcgcgtattgtgatgggtactccgtgttcgtccgaacctccgataaagattacatcttcttttttcagtctcagatagcggacgtagatatcagcgggtacataaactcctgccagatgtccgatatgaaccgggccgttagcgtagggcaatgccgacgtaacggtagtgcgtttgaatttcttttccattgtgatatatgtatctcttttgttatgagcgcattttggtgtgcaaagataacggttttccactcaaagaaaaagagaagacaatgaaatgtccaatgatgtattcaaaaagattcagaaattgtgtatcggttattgattgcaataccgtagaatcgctttttctatttcggttttcttcttttcatctttcacaaaatcacttattaaaaatatatgagtggtagattgtccgattccgattaaagttcccacctgattattaatttctttaatccacttgtcaaagcccatgattttatcgccttcggcaacaaaatgtgacgggtttcctccatttgctttaaaatgaatatttactttactgcattcctcaaaaattgggtttacatccagaggataacgagatgcattaaaatagttggtgtaagcttgaacccgcttcctaaaatccacatcagatagcatatagctatattgagcaacataagaaagagaggtatatccccccaagagtacatcggtaagaacatgggtaccatattttttcactatctcatccccgttactcttgtctaaatcattcaggaactctttagacaagaaaaaacacaaataatgtggccaaacatggggaagggtatatctgctggtagggtgaaaacattccgctttgtgaaaatagttgccttgcaagttttcctctatatttcctatatcttcggtaaatagcctaagaacatcatcccctatctttgtttccacttggctatttaaatagatattatctatatatttattcaagtctcgattttcacttataacccaacctcccccattgtaaagcaaaaatatttctactgtagaataagggtatagtttaattggttcctgctttacataatcatatccgtcacctgctaacagacgttctacatcaataactttgccttttacatttatatatccctttatggtactctttttacagtcaaatcctctgcccaataagtctatgtaatcataggttttatcgttcgttactgtttctataaatacttttatatcaacaggatctttctctactacagtcggcggttcgatttctggttccggttccggttccgaaaaatcacatccactccaaagcagtaacagtaccccaaataaagtgtagttcagtctcatattttaatttttatattgacagtgataaaaagcgataaattgggtgctttatcgagtttccccttctatgtcatatccttcatcgttagaagctatgcaattgatgttatattcgttgttaatccctttcattctcagccagtgagccttaggaggaggagccgatcttgttgtttcgaataaacctaagtttaaaacagcgtccaacatatacaacgctacatagtcgctttctcctatatcataaacctccgtagcctcattgccatcatccttcttataggcgagtgagaggtagtatttcttctcggatttgtatattgaatatagcccttttgcaatgtccacatcttgaacggttatgcgaaatgagcgcttttcatcctctttgaaccataaaaagccgccttctttcaataaagggtgattgctttcacgtatgatggttccgatttcattgtctacaacttctgcttttataataatactggtgtggcaaatgttatctgttatttcaatagttgctttacctttctgaatcggttttatgactatgttgccatattccccgtcttcatagatatatgcttcagctatatcagagttcaagttatttatactataatccatattaccgcttaatatttttattcttccccaaaatgcttttgctatttttatatcttgtgtttcaatggtgaaatcaagataatgttcatcggatgagcaagaatacagaaccggtattaatatcaggaaaaagaaatgcgatagtttcatcataattagggtgtttataaagtttgtatagattgacgtttacttcataattaataaagtatcatgcaaatgtataaaattaatttgtataaagcctagatttatggcttatttctgagttcaaaatttttctgaattctgagtttgtctaaggatttttctccctgttcttttaaggaacatgtgggttgtacgacaaaaaagaacaaggggaaaatccttcggatacaattcttaagaaaaagttgaaataaaacagttcataagctatttctttgtgatattagccagaactaaaaagttagagttgaatgttccattacttgtttcgaaatccatagttgtatctggattgaatttgtaataaccatcgttattaccgttccatcccatgttagcatgaaaatatagatcatattgcttcaggatttctctattagcttttatacacatggcatatccatcaataatccaagtatgaccggttgatggatttccatcttgatatcctcctactattgaaatatgattgttcatgacaccattcaaaattgcatcaggctcccaattattatatgttgtaaaattacttattgtttgcataaatgcaatgagatcactgttctttgtactgcttgcgataacaacaggatagttaggacctggttgaatcgtaggatctacttctcctaatattggtattgtgttagtcttttcatatatatacttaatcaatgtagccgccatgtttgcttgtggatatgttgatgcgtttggagcttctggcgaatagtttattagttcatccttggtcaacagttcccaattcatagtagtgccattaattgttagatttggctttaaataggttaacgcttctgctatggaaacaactccgcatcctgcaggtcgatatatatcaatatatcgttttatagtgttatttggaaaataccaaatttccatttgtgatgctcttggcaataacatgttatatggtacttcctgtccccattttacttttacaaatggtgatttccatgaaactataggggttggaagagaatcgtaaggttcggagcgtgtgattgtttggtccgttatacatatattattctttattttttcaaaagacacttgttctttcggaatccctaattcttgagataacttattaatggttttaacttttaaagaatcttgatattgaataactttctctatttcatgtatagtgcttgtttgtgccatatcaagcatgtattttttaccaatggcggaatgtgatttggtatctgatttttctatataggcaataactcctggagatcttttgtctccagaaacaatagcgcatccctctgttccatttttctgaaatttgactttatagaaagggatagataatgtttctccagctcttgctttggtattattgccagtgtaatatttatctactatatttacatttgttatagttgatgaactccttgtctgagaggctactttgaattctctgacataattaagaacttcattttcagataaatcattattagtatcgtcataagcaatactaagaacttctgctgttgtcattggaattttgagatttgtaatctcatcgttttcaacttcgtgaaagatttggttttcactacatgacaaaaggaatactaaacttaacataatagtcaagttactgataatgtctcttcttttcatattttactgttttccaagatattcttttatactttgttgttatcataaatgcttattcttcctaaaatgtattcattttaagagaaatgagcttttaaatctttatttgtggaactattgttatgtcaaaccatagcgactgatcattcggatttttagggtgtaataataagtcatcatgcgaaagatattgtccactatttacgtgtctcaacatatatttgttgttttgtatagaaaccgcttctacagcccacaattggtcaaatgctttttcgttaaaccttggtaatagagtagataacgaacgtaccgtaaatgcataatcaacaaaattcgctcctcttatcccgatgcgataatattctccataaggatagaaggtccaacggaatttccacatatcactttctttcatttccagaggggcactactctccattggataataattcaaaaccacagtttccgggaaatatgattctgccggtatatacatcattgccggtgtatacttcttattgtcggtgtgtgtaaagtggagaattgctttttcgtaatccaaagtttgcattaaagacatatttatctgttgtttttcacaatatctcacaatggcatcctctatttctttctttttagaagcatcatccactaaatcgcttataaaataaattttcgttgtattatcccctattccaatcacttgttctgtagtttggtctatgctatttagccaattattaaagttaagagtaaaatctcccagctcaccttttgatgggtcaaacgagatattggattgatcaattgcatctttgccaccataagatactatagatatgcttacatctttaaaactactaaatcgtttttgtgcttcggaactacctgtgccgactgaaacctgtctgataaataaatctgcttcatttttgaaagagctctcattagcggcagtagtcatttttgcattgaacatagcgctgcaaactcctcctaacaaaatatctgtaagtacatgggtaccatactttgcaacaatgtcgtctcctgtataatatttcaaatcatgcaggaaatcgtctgttagaaaatacttcaaataggcgggatatatctgggacagttttagtttcctcgtagtcttttggacatttactctatagaagcaataggaattactaaatcgggaagaatcattgtaaaaggccttcaagtctgcactatacaactttactcctaatgcatttatttctgtatttgcattgtatctggaatgttggcctttactatactcttccaggttggccccccattcgatgtacgtttctcctccagaaggaagaagagatttttctatattgccgggatacatagtaacctctgctccggtaatagggtcacgtccttttcccgacaaaaagcgttccaggtcgataatgctggctttcccatatttggaacctttaaatgcactggaagttgcatcataaccatgtcccagcaaatcattctcaccatctccagcgattcttgttaatgcatcagtatttattggtacatcaagatccatcatttcattattacagctccaaaacagcagtaataaagatactaaataaagaaaatgcacttttttcataactcttctttttaagtttaatttatatatttcaaaatcaaaatgggaagaagtttccggtaaaaggaacttcaaaagaaatcattttataatcttttattgcaaaatgtaaaaacatgatgtagtgaagaaattcctcagatatggaataccagcgattattgcagatagcttccggggctttaatccgaattttatttcataatgaggatttataaagaacaatttcctggccacaactgtgatatgattcttgcgggccagtctttcaaataactctatgggggttcttgtttcttttatggacagaagctctttgatgcagccttcgttttcgccactcattttcagaattgctttatacatagaagcaggtagcagatggatgaaggggaagtgggatattgtcttgcttttgcatatctgttgatgtcctccaaatggcatttgccatgcgggaaatgacatgaaaataagacctccgggtttagtatatttcggtagattggacaagaatgtcgctttgtcttctatatgttctatcacgtcatggcagataatcaaatcaaaattatgctcaaggctttttagcttgaagatatcggatgcaatgaagtttcctttgatttgtctttcttcaaaaaacaggatagcatccttgattctacctgtagatatgtcgactcctgtcgtgctgcatcccaattcggcaaagggcaacagattgcctccatctccacatcctatctctaaaatattcattcctttttcaatcctcttgaattttgagatataggggatatagtattttctgcttgttatggaaagttcctcgaagtagagttttctgtttttttgtcgtttttgcatacagcgtcttataagttgttcttcgtgtatttgggtagagagggggagaatatgaaaaaacttccttctttttttctctcttttccccctcttttcctaaaacggattagtgcgtaatttccagttggcaacctttttctatagtataaggtttattaatggttatactttgacttccttttaggataagtttagcaccattgctgactgtgatattttcagataatatatctgtgcccgtaacggttcggttggatgttacagtctgattactgaatatggtttgggccacagcgcgggttaggacatcgcttccttctatcggaatgatttcgtcatttgtgcaccctataatgatggcaagtacaaaaccagctgttaatataattttctttttcatatctgttttttctttttgattattgttgagcttccaatgcgctaactttctcatttagatctttaacagcatcaataagtactgctatgaggctcgtgtagttgatcagtttgtttccatccggatcagtcaggacaatgtttggtaggacttgttcaacttcctgagccaataatcctatttcttttccatctccgccttttctgaatttggtattgtctgagttgtctgtgaaattgtatgaaacaggcctcaatagctttagtattgataaactttgagataatgattggatattttctttagccttggcgtcagaataattatatacattcttcacctggatactgttgaatgtacttgtctgtgtattgaaaaataccacttggtcatagtggcttgccagtcgggtcgctgccggtgtcacatcaacctgaaagaaattacttcctgggccttttatgtatactccattagtgaggagagttggactgtaggtgccaaaaggagttgtgttgccaattgttaactgacccttgctgtcatactttatttgagcattaaccgctgtgcaaacgattaatagagctaaagctaaaatcgctttggaaattgtggtcatttgatttttcatcttaattaaatgtttttgttgttaatactaatgattatttatagaacaacgttgttttttatttgacttgtgttaaaagattgtcttatgttttagtgaactatggcataatgctaaaataaccataaagtgatacttgattatatcttaattcaatcttgtaatctcctttttctgtcgtaactattttaatagctgttggctgattgggaactactgttatgaaaacagattggataatattattgctgctgtcttttattgtaatatccatgttgtttagtaaaatgttagaataaatatgtatggcgttattctcctgaatgataataggaaagttagtgatagaacgattgtcttgttcccatgggtttgtgtctttaggatcatggcactccgcaacgttatatatcatatgaatgatagctccttttgcacttgctgtgagaagaagagatgctgctaataatatgaagataaaaagataacgtaacatgattctttctttttgtgtttttacaaatgtagggacttcgtgtaagaatcatgcgataattaagtacgcaataagtacgcattttatatatactcaataataatagtatgcaacaagtacgcttctgactacattgagctaatgaaaatatcccaatcttcggggcttccatccatattgaaaaccttcttgtataacctttttcgtatggatgtaatggcttgcttggtatgtgaggttatatatgcaatttgggtaggaggtactcctatttttatgagtaggcaaacttgcatctctattgtcttcattggatagagatcaagtagacgtagcgtgaaatctgtataggcttcatttatgctatgagtcagttcttgccagtcttcttttttaatttttatcccttgctccgcctttagaaatttgtggtatattggtaatttctttaaaatagagataccttgttcacgaaattcttgtttagctataatttgctcattgcttttttcaataagctttttctggagattgagtaaatcttgatttaatgaactttttatgctttctgcactctgtagcgattgttccagtttttttatttgcctcctgttttcctcaatgcatgccaaactttggttatattgttcttcttgcattctttttattctcctttgttgggctaattcttcttgtttttttctcttatgatattgccaataaacagcaaagattagtataagagagatgagaaaggagatgaaaataatattccatatcttctggttattagccgtatctttcaatcggttgttttctttttcttttaattggtaattgtataatgagtttattttgcgtactgtttctgtctgaataatatttctcgcagaatctgtatatgctaaatctttgtctaaatactctaatgcttttttgtattctccttttagacgtgcaatgtagcccaatccctgatagccttctgccttgtagctatatcggttcatgagtgacaattgggtgtaataataagtagctgagtctaattgatttgtatggtagtaataacgcgctgccgtacaataacggggagctaaattgatagtgttgatctgctcaaaggcaatttgcatgctttgataagctttttgatacatccccagtttagtgtaatattcagatagttcactgttgacgattcttttcagatttatgttctttattttgtcagctaatttatctgcctttttgtagtagtatatagcactgtctgccttgcccaatgtactaaatgttcgtccgatatcccgtaaactgtaagtaatactgatgctgtcctttgccaagatagcatattgatatgctttgacgaatacatcgtgtgctttatcatatacttcttgataaagataaagggttcctatttgactatagatgcgacttgttaatctatagttcatgcaagcacttgatgcatcaatagctttgaagaaataatccagcgcctgcggtgcatctcccaaatccctatatatccgtccggcataatagtatgcttccggtaggtgctttttatctttcttcttttcataatagtgtagtacttccagtatcaagctgtcggaggtatgtgtaatatatgctttgtctctggcctttatggtcagtagctgataatacatttgtgtttctttagattcctgagaagcactatctttgaattgttccaacaatgcaatggcactgtccggacaagtatttgcaagagaatcagcaagctgtaagacatgaggataagatttactgtcacaggagaggaagtaaagtggtaagagaatgattatcagtagcggttcaggccatttcatatgcgtgatgtattattggatagtgttgtttagctgtacaaagataataaacttttgttaaagttgaagactgaaattcgttttttttgattttcgtgttacttgtcgttatttatacttttgtctgacactttattgtttttagtctctgtacttcagttattttaaaatcttcgataataattgagaaactacagtattctaattatagaacttctgaatatgtctccacaaagtataaaagcaatactctttgacttttagattaatttcatacatttgcatcttggtctgataatctggtattgatttcctgtagttatttatacgaatctttttttgcaatgaaacaaaacaactttttaagttccctcactaaagaagaactgataaaactcatcgaggcctattccaaaaactggttggctatggatggcgtgtggttccaatcgatagaacggaaatttggaatggatgaagccatgcatcacgatagggaggcatggaagtctttcacgataacagaggcgagaagaataaaacaattcctcggattacctgaacatgcagggttagagggcttggcaaaagccttgcagctacgtttttatgcgaatataaataatgatgagattattctggggaaagacaataaaactttggtgtatcgcacgcttgaatgtcatgtgcaaacagcccgcaaacgaaaacagatggagtatcatccttgtaaatcggtaggcataattgaatatagcggttttgctaaaacaatagatgaacgcattacttgcgaatgtcttagctgctatccggatattaccgataatagctgctgttgcgcctggcagtttactttgaatgagtaatacggagaatttcataggtgtatataaaaaaacgacccgcctatttgagcattgttaagaggcttggcaggttctgttgattacaaatatgaaacttttctcttaaactgcaaaatatattctgaaatagttttgtttctgccgtccgatcatagagaaagtttattcgtattcattttcttatcgtttacatgcccttttccttgcttttacatagcctttcctttatctttatattctttattttgatttgactacagttgtggagtacatgcttcacaatagtggatcagcaaaaccacggtagtgaagcacgtgctcaacaactgtggatagacaaaaataatgcttgtcaagtaagcattcggccttgtacgtgtttctctccaagctataataaagtcaaaagccagacgtaatacgtctggcttttgactttatcagtctttcttgtttatcccttccaattaaatggcagtaaatcggagtagtcgtttttctcttctctttctttatcctgtactctaatcaacacgtcctgcatccatagtttcgggttcaccttattttccctgcaacatcccatcagtgaaaagaatattgccgctgcgtgtgcggcttcatgcgcccctgagaagagtacattctttctgttcagcgtcaggggccttatggatcgttccacgggattgttgtctatacagaaccgtgcgtcattcacgtatcccgatagctgttcaaatcgtgtgtacatatagaatatggccttggcaacaggcgatttatcgactgtatgttcatattcctccttgcaccatttttccagtcctttaataataggataggatgtttcccggcgaagctttactacagcctccccttccagatgttctaccctgattttctcctccacagcatacagtctgcctatttgttcaagtgcatgccttgctctgggagggtcattcccttccgcttccacaaacttgcgcctgacatgtgcccaacagcacaggtgcaactttccgggtagcgtgtcgaactcgtcatatactgcaaagccgtcgctctgtaccacccggacctgtcctgccagcagtgtgtctattccgctgctgccacgtcccttgtgatattcaaagaagggggtatggaaccggggcagatagaagttccacatatacccgcgatgaagggcaccggggcggtcgctttcaagtacgggatggggcgtctcatcggccatgacgtaataactgtccttaaccagttcacgaagctcattatagatcggctccagacgttgtgcggcagccatcatccagttacttacggtggaaggactcagatggatgccttcacgctcaaaaatgtccaactgcctgtgcagaggcaggtgatcgtaatatttggcggtagcaatgtgggacagtacactctccgacgcattgctgtgaggatgtgccattacgggcatgggagctgttatgatacgaccgtcggcaagccggtatttagggcggatgatacgtctcacatagaatcgggcagggctgacggcatattgttcgctcacttcatcccccagcttcgtcgctccctccagcgaaagaccttccggcatgggaatgatgatttcttcacggggaagggacgggtcgatgggcttacgggcgtggggagtaatctttttggtgaagctcttacggaaacggttgtaaccagtctccgattgggcagatttttcagccgttttccgctcctccgctaccgggtcattgacatcggacggagattcaaaacagatgctcaattggttggcgtcttcgggaagatgacgtttttcactggatttaccccataaacggcgtgtcaagtcagccaatttccatctcaggtcggcaatgacagcggtgcaggctgagatttcctcgacttggcgggaatactcctgcaaagaggcttcgtattttctcagaagttccgcatgttccttttcaagacattcacgttccttgcgcaactcttcgtactcttccaaggtaagggtaatgactggttctttcactgtatatccacttttttattatgcggcaaagttatcaaaataaagctgtacggattgtaggatgggagattacttttcaactgttttccgatactttttaacagtaagcagctcattcaggcgattccaggaaatttgaagaaaatctcttttccgttcgtcctttttcaagaggaaagaactgtggttcagacggcggcattccagacggtattcgtcctcgcaccgataaaggatatgcaatctgctacgggaacggtcaagaaaaatatggcaactctgccctgacacgcaagaacccgtatgccggatgacctcgccacaaagaccgtcaatacctttatggaaattacaaccatttggataaaggtaataagaccagaaaggactgctacggaaaagaccaagacctaaagggagaagtagatcctgaggagaatggatgccaagactggaagccgaaactttataacgacgaccaccatcaaatatgaaaagaacagaatcaaaatgattagactcggaaaagagactacgcagtttctcactttcactagaaaatactaagactgaacacataatggattaagatgattatgaagacacaaaggtaggaaggaaaagaagggaaagaaacacgcacaaggccgaatgcttaccttgtcaacgaaagaaacataggctattaacggaagaaacataggggaataacataaacgataccttctattttctcaccggaatgatgggaatcgctgccattcggcacgttcagcgtccttgtgatgaaggaaaaccggaaaatgagggactgcggaaacagccggtttatgtactgaaaaagatgtaatagaaagactatcagtggagtatatgtgtatatgtgggtgtaggcaaaattgcttgcactctatttgtttttactgccaccactgctgtattgccgatgaatagggaaatatgaagcatgagtgcaagcgtgcaagtaaaagtgtgcacaaactatatgtaagacgttaaaagtccgtactcctttgctttatctgtaatttctttggaactttgcattgcataaatggtgtaatgtaaaatatgtaatgaaccggatggagactcaggaaatgaaacatactattaaagtcattgctttcgatgcagacgatactctttggagcaatgaacctttttttcaggaggtggaacgaaagtacacggagctattaagtgaatatggtaacgcaaaggagatttcggtagaactgtttaaaacagaaatggaaaatctggaatgtttgggctatggtgccaaagcgttcactatttcaatggttgagactgctttgcgggtgagtgaacggaaggtgtcagcagataagatacaacagattattcttttaggtaaatctctacttcagatgccgattgagttgctgtccggtgtggaagagaccttgaaagctctgaaggaacaaggccgttatcgtctggtagtggctacgaaaggtgacttgttggatcaggaacgtaaattgcaccgctccgggctgacctcttattttgatcatattgaaataatgtctgataagacggagaaagaatatacccgcctgctacaaatccttcaagtcgttccggaagaattcatgatgattggtaattccttgaaatccgatattcaaccggtactggctattggaggatatggggtacacattccttttgaggtgatgtggcagcatgaggtggtggatacattcgctcatcccagattgaaacagatgaaaagtctggtggaactgatggactggctttaatgatgcaggttaaatattcgcatctatttgctttatccgatatttattccgtattttgtgttacataaaaagtgtaacgtaaaatatgtaatgtcgcttatgaaacctcagaagatgcaaccccggaatccttttttagtgtatggttatgcgaaccctcgttatttttgtgaccgtgaagctgaaacacaacagatgttgtcggctttggagaatgaacggaatctgacattgatagcgcctcggcgtatgggtaagacgggattgataaaaaatgtcttctataccctgcaagaggagaaaccggaagttgtcagtttctatatggatatttttgcaacgcgcgatttagcttctttcgttcgcctgctggcaaaaaccgtactagggcagcttgatacgctcagcgaaagtgctttgcataagctgacttccttttttcgctcttgccgaccggtgattagtgcagatgagttgacgggagttcctacagtaaccttagactttgttgccgacaagtctgaacagacattgaaggaaatctttgactatatggctgcttccggcaggaattgctatctggctattgatgagtttcagcagatcacttcttatcctgaagaaggtacagaggctttgcttcgctcttatatccagtttatcccgaatgtccgtttcatctttgcaggtagcagtcagcatttgatgcaggaaatgtttgtttccgccaagcgtcctttctatcagagtacgcaattgatggtgctgcgtgagattgatgaagaatcttattatcggtttgcaaggaacttttttgagttgcgggggcaagagttggacaaatctgtatttcattggatatatacccgttttgagggacatacctggtatatgcaggcaatgttgaatcggttgtatgagcgaaatgagtcggttgtagatatcactcaggcagagcaagtgctgatggggcttcttgaagagaatacacctgtctatcagaacctgattattatgctgacggacaatcagttggcactgatgaaagccattgcgcatgaagggaaagtgacggcacccaacagtggagatttcattttggggcatgggctgaaaactccgagcagtgtcaatgccgctttgaagtcgttggtagagaaagaactcgtctataaatcgaccggcggatatatggtttatgaccgttttatgggaatgtggctattgcggaactgatagattggctttaatatttgcggtctacatgatactctatcctgtagatgtgatcgaaatgctctgtccattcattcggagcaatgccaatctgtagaccatagaagagagtgcccttttcccggtgtacgctcatttgttttaatagctcaggtttgcatttggggatgcggtaatcgctgataagtaagacatcagcattcatatagcggttctcgtcgagcattctgaaagtgtctttcagcatttgggtggcatccgtatcaccggtgaaggggtggctgaagaattccatcagtttcagccggtcgcggcgtatgtcaatggttttggtggatacggagaatgtgatgaggaaacattccctgttttgaagttcagctatttcaatcagttttatcagtaaggaattggccattcgctccggtttccccgtcatgctgcccgatgtgtcgaggcatacgatcataggccctttcagaactgccggttttgcttccagacgtctggaaggctgcatgatttccgatttataacggaaggtctgtagcttctgcgtgaagtatttcagcatgaagacatcttgcagttcgctgtctgcataatatagcaattccgaaggaagcagggcgttcaggtcgttaccgatggtgacacccagaatatcgctcttttgggaatgagccagtttgtagacactgccttctgttacatatacctgtttgctgccttcatcgtcggctattcttcccatgcggttggctaccttcagcagttcggggtattccttttgcagttttacaatcttccggatattctcaaaatcgatggtattccacaatccgttcatcatgctccatgcctgatagaattcctccttgtctacttggtgttcttccaggtattccggtatcttgttcaggctggttttcagtttcttttccagaaagtctttcttggcatctagatttttctctttctgttcctgctgcttctgctgaaaagaatcttcccagtctttcaacatcttctcccaaacggtggaatcatgttgcttgtctttgtccccgaacatatgttcgtagaatggttcatcgaaggcattctctttatagtcatctttgattttcctcagtagggcctgccatccatcccgtttctctttaatccagttcagggcactttccatttctccaagttcggattgcgctctttgcatctgaaatttctcttgttccagaaactgccagacaaattgcgtggtgatatcgtagaatatgcgtgcacggacctcatcgcccagcaccagaaccctgatggacggatcgttcatgatggccagcagatagagaagcaggggatcttccgtttcaccgtatagcgtcttggcacattctcccgtttgtacgaacttctcgactacctttacatagaactggatatcatacttccttttgctcagccctgccatattgccgcaagttgaattgtaacttttcctcttcgatttctacgttccgcagttttttcagcacttcgtccgagtaatgggtgattaactctttgtcagcggggctgacgaacagattgtccgtgcataaggagttggtaagggtgagaagatgctgaaagagccggttcagttcatcccggtaattgcgggaggtgatctggggcagtttgtcgaacaggttttgggaagtttgttcggactggtgagatgctttagtcattttttctcctttcttcctttgcgtcatcggatatcgcacaccatctattaacaggtattctgttccctctctgtacaggttcacccgttgctgaactgcgcctgagggtgctccacccggataacaacggataattgagcgtcccggattcaacggatcgggatagatgacggcttgtctcggagcattctctctcttctgctctttcagtgccagatagtctacggcgaagatataggtatgacctgtgccatgttctgctacatgatagtagaagtaatccgtaatttcaaggtcattcttgggcgagcaattgtttttaaaatcttccagcgcctggcgcacccggctgattcgtatatcactcttaatcgcttcggtgatttcttccattttttcaaggcaggaagtgaacagttcacggagaactaattgatgaatgggctcgcattcgtctatctcgttccataggcaatggtatagaggcggcaaatctgccgaattcacggctgtgcgtccgttgatgaaggctgaggctttcaatagttgcacgatgttcttccagcgtcggtcacttatgtatacgtttcgaattgtgtcttcatcatccagcggaagacgtttcaattgatggcggatattcgtaatataatgtagtatttcggtggatagtgaaacctggtttatctttctgcgccagtctgcatattcttcttcactgatttgcagatctgcgggtatgtttatttctttatcattattatcgagcagcatgttgtagaaggtcgcttcatctttcacacaggtgcagatgatgcgtaacagaaatcggtcccacaatgcttcgagtccttcgccgtgcgcgggcaattcgttactggcggcaatcagaagtttaagcggtagtttgatttctctgtctccgttccggtaaattttctcattgatggcggtgagtaatgaattctgtatggcaggccctgctttccatatctcatccaggaatactacacttgccgtagggagatatccttcaatggcacgttcgtatttatcgaattccttgagccggttgatactgatagggccgaatatctcgtcgggagtagaaaaacgtgacatcagatattcgaaagcctttgctcccttgaaggcagccttcagtctgcgtgccaccatggatttggcaacccccggaggacccagcaaaagaacactttcgcctgccagtgcagccaataatgacaagcctaattccgtatccttctcataaacctcttggttgatggcggttaatagttgttgtattctgtctctgatgtccataattctgtttcgttatgtctccatttttagaatgaggcttcaaatatatgaaatctttatacggaatactgacaattattttgaattgttgcaatatctcttgttctgccattcaaaaagactgcttacttgcccccccctttcccgattacacttctatttttcttttcttttccgattgcaggattgcataaaagacgtatatttgtcacattgtatcctgaacttaaagtgaacagactatgataacaaaccaattgcttcgtcctgccagtattgtagtggtgggagcatccaataatgtgcacaagccgggaggcgctatcctgcgtaaccttattaatggtggttataccggtgaacttcgtgccgtgaatccgaaagagacagaagtacaaggtgtaacagcttatgctgatgtgaaggacattcccgatacggaacttgcgatactcgctattcccgcacagatgtgtcctgatgccgtggaagtgcttgcagctgagaagcaggtacgggcgtttatcattctctccgccggattcggtgaagagacacatgagggcgctctgctggaagaccgtattttggaaacggtaaataagtacgatgcttccctgatagggccgaactgcatcggactgatgaatacctggcatcatagtgtgttcagtcaacccattccgcaattgcatcctcaaggagtcgatttgatatccagctccggtgcgactgccgttttcattttggaaagtgccgtaacaaaaggtttgcagttcaattctgtctggtctgtggggaatgccaagcagataggtgtggaagatgtgctgcaatatatggacgagaatttccaggcagataaagattctaaaataaaactgctctatattgaaagtatcggtgacccggaccgtctgttgttccatgcatcctctctgataaagaaaggctgtaagattgctgccatcaaggcaggtagcagtgaaagtggtagtcgtgcggcatcttcacatacaggtgccattgccagttcggactcggcagtggaagctttgttccgtaaggcaggtattgtacgttgctattcgcgcgaggaactgacgacggtaggttgtattttcactctgccggaactaaaagggaagaattttgccatcattacccatgccggaggtccgggcgttatgctgactgatgcgctgagtaaaggcggactgaatgtgcccaagctggaaggcccggttgtggacgaattgaaaagtaaactcttccccggtgcagctgtaggaaatccgattgatatcctggctacgggaactcccgaccatttgcgtctttgcctggaatattgtgaagagaaatttgataatattgatgctgttctggctatcttcgggacaccgggactggttaccatgttcgagatgtatgacgtgttgcatgagaagatgcagacatgcagtaaaccgatctttcccattcttccctccatcaatactgccggagcggaagttgccgctttccttgctaaaggccatgtgaattttgctgacgaagtgacattgggtaccgcattgtctcgcattatgaatgcttcccggcctgccgccaatgagatcgaactctttggtgtggatgtgccgcgtattcgtcgtattatagactctatccccgaagatggatatattcagccccattatgtacaggcattgctgcatgctgccggcattcccatagttgaggaatttgtgtcggccaataaagacgaggtgctggcttttgttcgtcgcacgggtttccctgtagtggcaaaggtagtgggacctgttcataaatccgacgtaggcggtgtggtgcttaacattaagggagaagagcatctggcgtttgaatttgaacgtatgatgcagattcccgaagtgacaggtatcctgatacaaccgatgctgacgggtacggaacttttcgtaggcgccaagtatgaagagaaattcgggcatgtagtgctgtgtggtttgggtggtatctttgtggaagtgcttaaggacgtttcttccggtctggcaccgctttcgtatgaagaggcttactccatgattcattcccttcgtgcttacaaaattatcaagggaacacgcggacaaaagggggtgaatgaagataaattcgccgagattatcgtacgcctttctactttgttgcgttttgcaacggagatcaaggaaatggatatcaacccactactggcaacggaaaaatatgtgattgcagtagacgcgcgtatccgaatcgaaaagaaatgaaacaacgtattttcctttttctcatctgtctgatacatgttttggcgctttttccgaaaagtgcggatcgctttttcagccagtacaactttaagtttatcactgaaaatgcagggctgccttatagctttgtaagtgatatctttaaagattccggagggtacgtctgggttgccacacattatggtataggcagatatgatggttatcagttcctgaattatggtacacaaacggaaccgatacgcttaaagaatgactttgtccataagatttgtgaagataacttccggcgattgtggattgcatccgaaggtgggatagatatcctcgacctggatacttatgctttggtaaaactccctgttccaccggatagtccgctgcaaaagttattgaatgaaaacgttagtaccatttataaagacagacagggagatttatggatttccggcaataaagaactatggtgtattgatttggacgatcagggagatataaagacctggtatcgtctgaagagcgaatgcgaatctcccgtacatgccattcttgatataggttggacagtttgtgcaggtattgacaaccaggtatatcgtgttgagaagcaaccggatcatctcttaaaggcagatatcttgtccgatagtttggtttctttcagtgaagattggcggatttcctgtatgcaggcggatggggatgctttgtggattggctctaaccgtggtctattcagatataatcatgccgaacgaagtctgaagaggtatcgctactccactcatcgtcccggaatgttgagccaagcctatataacggatatcaaacagacggaacggggatacctgatcgtatctaccctgaatggactgaatgtgtataacaaagatacggatactttttcattcatccgtcagaccagtgaccggggtggagtaaccattaactgtaatgccatcaactgcctgttcaccgatggagagaccatctggctgggtactgaaaccggaggcattaacctgctttccccgaagcgtttgcaaacagaattatggacatgcggcacttctgtcacagaaacagatactcctacacctgttaatgctgtaggtgaagataaagacggcaatctttggattggattagtagaacgtggactgatgaaatggaatcaggaggaaaagacttgtgcccatcatcttttttctcctaacgatattacttccatcagtaataacactattaccggactgctgattgactccgataatcgtttgtgggcatatacctggggtgtgggcattaacgaactgaacctgaatattcccaataaccgtacctttaagcgctatacccgtgagaatattcccgaattggaaggtgactttattaatagtgcctgtgaagatgtgatcaatcacggaatatggttcggctctacacgtggagtgcatttctacgataagcggaaaaatactttcatccgtgtattattcgatcagtcggataatgagttcgaagcggttcacgccctgttgattgatagaaataaacgtttgtgggtgggaaccacgcaaggtgtcttcattgtagaccttgcttcttttgctaagtcgaacaagcgctttgattataaatatcttcggtataaactggataatccacagtcaacacaactggaaaagattaatagcattttggaagacaagaatggtactatctggctgggtggcaatggaagcggactgtatcagttgacgagtgacaagaataatcactttgtctttaaaaactataccacacgtcacgggttgcctaataatacaattatcggtatggctgaagacgggaagggaaacttgtggttgactacgaatgatggagtgtcccgtctgaatatccagtcgatgacattcagtaactacacgcaggctgatggcctgcctgctactcagttctactggaatggcatccattattcgtcaaagcacgactttatctatatggctactatagacggactggtcattattcattctgataatgaaacttcgccgtctgcggattcgcatgtgaaactctcttcactggcaattggaggaaatattatctatccttccagtggtgattatctgcaaaaggatatcacccttgcctccggtattttcctgcatgaaagggagaatcgtttctccgtaggatttaccacacagaattatgtaaacagcagccgtattcgctttgcctatcgtctggagggatacgaggaagagtggaatgaaactcaaccgggtgattgtatggcaagatatgtagctgtcccgccggggaactacaccctgcaagtgcgtgcgacggatgagttggggcgttggtcggatgaaataaccgacatagaagtggggatcactccttatttttataaatccattggattctatctgcttcttgtcgtagttatttgccttgctatttatttattctataagcggaagatgcggagttatcgtgaacagaaagcgcgattggaaaaagaagtggaactgcgcacgcaggaactggctgtccagaacaaacagttggaaaccatggctcaacacgtaaaagagattacggaagagaagattgctttctttacgaacatcactcatgaattccgtactccggttacactgattcatggccccattgaacatgctttaaaggagacgcaggatgaggctgtaaaggcacagttgcagatagccgagcgaaattcacggtatttgctttctctagtcaatgaactgatggacttccggaaactggacatagacaaggtggtgctggataagcgttcctcgaattttatcgagtttttgtctgagttgctgatacctttcagagtctttgccaaggaaaggcatatcgacatatgtacttatttccgtttggagaatccctttctgatgatcgatacgggatatatgcgcaaggtgttggtgaatctggtttcgaatgctattaagtttacaccggatagcggtcgtattgacatatttgtggcatctgttaaaggaaagaacggggagaaactattctatatgaatgtatgcgatacgggacatggccttgtggcagaagatctggaaaaaattttcgaccgcttttaccagtctaagaagagtaccaaatattcggtttacgggcagagcggcacaggcatcggtcttttcctgtgcaagcggattgtatatttgcatggcggagaaatctttgcccgcaataatcacaggcagggggcttcattccgtatgttgatgccgctgattcccggagaacgggtagagacgaatggggagtgggtacagcctgatagtgtatatctaccggatactttgcaaccggaggatacccagaagaaagagactatcctgattgtggaagataataaagatatgcgttcgtatatccgcacactgcttgtgggggattatcgtttgtttgaggcaggtgacgggcaggaggcccttgaaatcgttcagaaacataccgtcgacttaatagtcagtgatttgatgatgcctgtgatggatggtatggagttgtcccgccgtatcaaggagaatctggcgacttcgcacattcctttcctaatgcttacggcgcttcgctcggacgtacaagagaaaagaagctttgaaataggtgtggacgagtatctttgcaaaccttttgatgaagaagtgctccggcttcgtatccgtaatatactgagtctgcgaaggaaatataagaagatgttctcatccagcagtaatgtggaagagctgcatgtaaaggaagaatcgcgagacaagacattcattacgaatgcggtcaacctgatgaaggaacactatgccgatgcggaatataacctggaacgctttgtacgcgacatgggctacagcaagacattggtcaacaagaaaatgcaggacctgacgggacagcccatcggacagtttatgaagaactaccgtctgaacgtggcgcaacggatgatacaggagggatcgggagatgtgaatgtttccgaaatagcctatgctgtaggattcaacgatcctaaatattttacgaagtgtttcaaagagttcttcggatatttgccgagctcgaagttggggaagaaggggtaagaagatgtgtcattctttactatattcgtcccaaacttttctattttctccttacataaaaaaataaacgcttacttttgcacatcacccagaagaatgaataccatgaaaaccaaactctgtttactcattttgttaatagtaggcttatccgttcagttatcagccaaccctataaacggtttgctcgaaagaattgataagggagcatcgaagaaatttgttatcgaattcaagaaaggtgcggatgattttttcgaactggaccagaaaggaactaaagtcgtagtccggggtaataactatgtgaatatagcgacaggtatcaactggtatctgaaatattatgccggtatccaactgtcatggaatggtatgcaggcgaaattgccgcaggtacttcctcctgtctcccgaaaagagcgtcacgaaacatctctctcactccgttacgatttcaactattgtacctattcctacaccatggccttttgggattgggaacgctgggagaaagaaatagactggatggctctacatggtatcaatctccctttggcagccgtaggccaggaatgtatctggttcaatatgcttcaaaaactgggatattctaaagatgaaattaaccgattcattgccggccctgcttttcttgcctggtgggcaatgaataatctggaaggatggggcggacctaatccggattcctggtatgtacagcaggaagctttgcagaagaaaattttgaagcgtatgcgcgaatatggcattaaacctgtgtttccgggatattcaggtatggttccccacgatgctgatgagaagttgggactgaacctgaccaagtctgatttatggaacggctttacccgtcctgctttcctgcaacctaccgatgtccgctttgccgagattgccgatttatattatcaggaacaggagaagcttttcggcaaggtcgattattattctatggacccttttcatgaagctgagaatgccgcttcagtagatttcgatgcggccgggaaagctattatggcggctatgaaaaaagtgaatccgaaagccacctgggtagtgcagggctggacagagaatcctcgtcccgagatgataaagaatatgcagaatggagatctgctgatactggacctgttcagtgaatgtcgtcctatgtggggaatcccttccatctggaagcgtgacaaggggtatgaacagcacaattggctgttctgtatgttgctcaatttcggtggcaatgtgggacttcacggtcgtatggaccagttactcgataatttctacctgactaagaataatccgttagctgttcacctgaaaggaataggtctgaccatggaaggtgcagagaataaccccatgatgtttgaactgatgtgcgaacttccctggcgaccggagaaattcacgaaagaagaatggctgaaagattatctctttgcccgttatggtgtaagagacgagaagatagaaaaagcatggattttgcttgccaataccatttataactgtccttttggaaataaccaacaaggccctcatgagtctattttctgcggacgtccttcgctgaataacttccaggcatcgagctggtcgaagatgaagaactattatgatcctaccgttacggaagaagcagcacggctgatggtggaagtagccgataaatatcgtggtaataataactttgaatatgacttggtagacatcgtacgacagtctctttccgataaaggacgtattgtttataaccggaccattgctgacttcaaaagctttgataaacgcagttttgcccgtgactcccggaaattcctggatatattgctgttgcaggataaattgctgggtacacgtagtgaattccgtgtaggccgttggatagagcaggcacgcaatttggggactactcccgaagaaaaagacctgtacgagtggaatgcccgcgtgcagataaccacttggggcaatcgtgtttgcgctgatgacggtggtctgcgtgactatgcacataaagaatggaacggtattctgcgcgatttctattataaacgttgggcagcctattggcaaactcttcaggatcaactggatggtaaacccgaagttaagctggattattatgcgatggaagaaccctggacactggcaaagaatccgtatagttcggttcctgaaggaagctgtgtggatgtggcgaaagaagtgtttgagaaggcaatgagatagtataactgagatacaaccaactgtgcatattgatatttagaaagtatatggaaaactctcaccccccaatttccacttccccacagaagaagcgacttttgtctcttgatgtgctgcgcggaattactgtcgtcggtatgatcctcgtcaataattccggtgggaagttatcttatgattctttacaacattctgcatggaatgggctgactctttgtgatctggtctttccgttctttttgttcatcatgggagtttccacttatattgctttgggcaagttccattttcaagcatctggttcggtggtccgtaagatactgaaacgtactcttgtcattttatgcatcggctgggctattcactggtttcactttatttgtgatggagatttctttccttttgcccatcttcggcttacgggagtgttgccgcgtatagccttgtgctattgtgtagtttcttttgtagccttgtatgtcaatcataaatatattggctggatcattggttgccttatcgccggatatgccgttttgctttgtataggcaacggatatgcaccggatgatacaaaccttctggctatcatagaccggaatgtattaggtgcagaccacctttatcataaaagcccgatagatccggaaggacttaccagtaccctttctgctatcgctcataccttgatcggcttctgttgtgggaaaatcattctggctaaggaagctttggaacagaaaacactgaaattgtttgttgcaggttttattctgatggcatgcggttttgtgctgacagaagccctaccgttgaataagcgtatttggtcgcctacatttgtgttagtaacatgtggattggcagccatgcttcagtctgtgctgatttatttcattgatatgaaggaaaagaagaactggtgtcgtttctttgaaatattcggtgttaaccctttgtttctctacgtactcagcgaggtagcggctattgtcattggtgccaccggaagtaagccggtgatttacgaaggggtacattttctgataaccgatccttatctggcatctgccgtttacgcccttgcctttacactgctgatgggagcgtgcggctatccattgtataaaaagaaaatctatataaaaatataataatgatgagacgaacaatctatacatgctattctctgttactggcaactgtgttgctgccgggtactacttcgtgtaccagtcgttgtgggactgttgacgagtcgcgattatcttatatcgatactcgtgtaggtaccgcccccagtgcgacccatacagcggggttgtttggcagggatacggaagaatacgggcaaaccctcccggcggtactcgaacccaacggaatgaacttctggactgcgcagacgcgggacacggaggagaaatgcatagcaccctattattacgcagatactctgctgcaaggctttcgtaactcccactggattgtgggcggatgtacgcaggactacggttctatgacgttgatgccgctcttcggtaaattgcgttgccagccggaagcacgttctacccgtttctcccatgagaaagaaacggcaacaccggcttattatacggtttccctgccggatgagaatatctatgccgaaatgacggggcgttcgcgttccgcaattttccgtttcacatacagcaaagcgggaaaaggttatctggtggtaaaccctaacagtgatgaaggtcagggatatatctgcatcgacacccttaacaatcagatttacggatataatcctgttcaccgcatttatcagggttggggaaaatcggcagggtatagcggatattttatcattcagttccaaaagaagctgacggattacggtgtgttcaagggagattctttgtctcccggcgtcattcagataggagatgcggcgcagataggtgcctatgtggagtttgatgtgaccgaaggtgaagaggtattggtgaaagctgcctcctcttttaccgaccgggatggtgctttgaagaacctgaaagctgaaattcctcattgggactttggacagacttgcacagagctaagacagatgtgggagaaacatctctctgctattgatgtagagaccgaacgacttgcagacaaggaaatgttttacggtgctttctatcgtgcttcttttctgccgcatacattcaatgatatagatggccgttatccctcttttgcgaatggcactccgatatgccaacttcctgaaggagaaacgtattatgaggattatagtatgtgggatacctaccgtgccctgcatccgatgatcaatctgctttttccgacaaaggggggagatatgatgcaatctttggtgcataaatatgaacaaggtggttggttgcccatctttccttgttggaatagctatactgccgctatgataggcgatcattgtatctccgccatcagcgatgcatactgtaaggggattcgtaatttcgatgtggacaaggcttatgaaggaatgcgtaagaatgcctttgaaactccttctaaccttgatgaatataaaaatggtatagggcgtcgagctcttacctcttatctggagtatggatatattcctcttgaagacggtgtacctgatgcttttcatacaaaggaacaggtatcacgtaccttggaatatgcttatgatgactttgcccttgcacagatggcaaaagctttgggtaagacggatgattaccaggcattgatacggcgtgctgccaattatcgcaatgtgatagatccccgtacgggatatgcccaggggcgccatgccgatggtacttttctgaatgatgccaatgcttttaattttgcccgttttattactgaaggtgccccctgtcactatacctggtacgtgccgcaagatccatacggactgatggcaagtatgggagggaaagataagtatgtagccaagttggattccatgttcagtgaacaacgttactggcatggaaacgagccttgtcatcaggttgcttatatgttcaattatgcaggtgaaccctggaagactcagcgtgttgtccgccacgttatggaaacggaatatctgaatgaaccgggtggactttccggcaatgacgatgccggacagatgtcggcctggtacatgtttgccgctatgggattctatccggtatgtcccggtactccgtattatatacttgccagcccctcattccccagcttcacgctgaatcttgagagtggaaagaagttcacagtgaaagcccgtaacgcatcgcagaggaatatctatattcagtcggcaacgctgaacggaaaaccttatacgcgaaactacattacccatcaagatatagtgaacggtggtgtgatggagtttgtgatgggggataaaccgaataaggagtggggaacggcagcggaagactgtccgccgacggtgattgagtgatgagctacatgctacgagctacaagtgccttccggtatgttagtgtaaaataatagttgatagcttataggactatatagcgcagcactcgtagcttgtagctcgtaacttgcagctcgtagcccgtagcttactaattttaagaaagataacttatatgagagcaaaagcatttttgtttgtcctgtgcggcatcttgctgttaggggcatgcggcactccgaagaccggagggactatttataacattatggactacggagccaaaggtgatggtgtcaccgatgacgccgcggccatacaagctgctatcgatcagtgttccaaatcgggtggcggaacggtactggttccggcagggcgtactttcatgtgcagccctttccatctggcttcatttgtggaactgcatctggaacctaattcctgtctgcttgccaatcctgatgaggctgcctatacactgagcgctttccgtgataatcgtggtgaaggcatgatgtggatttatggtcaagatctgaaagaggtatccatcaccggaacaggagctatagatggaaacggtgtctcctttatgggtaaggaactggaagactcttatgaactgaaaccggtgaccgactttgatccccgtccgcatgtactgacgcttatcaatatagagaaaacagtgatccgtgatgtgacaatccgcaacagtgcctattggacggttcatctcatcggttgcaacgatgtctccatcgatggcatctctatcctgaataacttgaagatacgcaacggtgacggcatcgatgtagaccattccaagaatgtgcgcatagccaattgccatatcgaatcgggtgatgactgcatctgtctgaagaatcgtcgtgagtttgaagaatacggttcgtgcgaagacatagttgtaaccaactgtactatggtttcccgttcctgtgccatcaagataggttcggaaaatatggataagattaataatgtactgttcaataactgtatcatcaagaacagtaaccgtggcatcggtattcagaaccgggatgaaggaacggttaccaatgtgattttctctaatatgattgtggattgcatgttcttctctgatgtctggtggggaaaggcggaacctatttacgtgacttcctatccgcgtgccgtaggcaatcataaggatgccggctggcgtttcccgaagggagctaccgaaggacgttgcggagaggtgagccgtatttacttcacaaatatcaaatgcaccagcgagaacggcatctttgtaggtggggatacacaagacaaagtgaatcatatctactttgaagacgtagacctgctattgcaaaagcgtacggcttatgagggtggtatctatgataaacgtccgtgtgtgggcgaagggtttatccatgataagacgtatggtttttatatcgatacggcatctgatattctgatagatgattgcaccgttacttggggagatatccgtcccgatcaggcaacagaaggcattgggcagagggatgttcgtaatctgaaaataaagaaataaaagtgataagctacaagctactgattcatattaataacttaaattcgtcacgaagatgagacaaagcataatttttatcttgtatttgctgtgtactttcacagctcgttcccagtctgcattaactccggagcagacaggaagtatttattatgcttatcctgttccttcatccacctatactcctgctcctgctggttatgagcctttctacatcagtcactacggtcgtcacggttcccgctggatgacggcggatgagcgttatacggaagttatctgcgtctttgattccctttatcaatgttccgaactgaccccccttggcgtggatgtccgcaaacgtctgcataaggtttgggaagatgcccgcggatgtagtggaagtatcaccccacttggcgagcgccagcaccgtgagatagccgaacggatgtatcataactttccgcaagtatttcggggggacgctttcattgacgcccgctcatccacttccctgcgttgtgccatgagtatgagttatttcaccgaacgcctgaaagaactgaatcctggcctgcaagtaaaccgtagagcttaccatcggtatatggattatatcgcctatacatcccccgaaggtgagaaatttgcttctgagaaggctccgtggaggcgtggcttcagagagtttgaaaaaaagaacgtccgtcccgaacgtctgatggcctccctgtttgtgaagcctgaagcgataacggatcaagacgccatgatgcgcagcctttattggattgccgctgatatgcagaatgttgagttggatttgtctttctatgatatctttgaatatgaggaattagtaggagtttggaagacagtgaatgcccgcatgtatgtttgcaatgctgctgctccgctcaatggcggcctgatgcctcgttgtgccgtacctttgctgcgtaatatcctggaaagtgcggatgccgccatagagaagggaacccctgcggccgatctccgtttcggacatgatactcatctcattcgtctgcttgctttgatgcagatagaaggatgtagtaatcaggaggtggatatggagaagtttcatcttgcctggcaagattaccgggtttctcctatgggagctaatcttcaactgattttctatcgcgataagaagaatgatatactggtgaaattcctgttgaacgagtgtgaagtgacactgccgttgaagagcaaaatggttccttattattcatggaaagaggttgaaactttcctggcggagataataggaaaagaatagccgtaaagtaagaatatataaaggattaccacccaatctcggcgtttatagagcaatcaactcctgttttgactaaaagttgtattttttatcctaatataaatacaagttgcgcaaaaaatacatatctttgtatcagagaatatgcttttactttaaagtaacaggcaataaaagaatcgtttaacataaaaaacaggaagcgtatgaatagaattcttaagttgggacttttaagtgtcattgtaggcgccttgtattcttgtagttccgatagtctatacgatccggacaaagcaggagatgtaaagcttgctcagtatgaagcagcttttgtaggaaagtatggagcaattgcttctaatcagaattggggatttggagggacaacaacacgtagttccaatcctaatagcaatcaatggaaggacttcgtggaagttccctcaagtgatgatcttacttctgagaaaataaacaaaattgtagagcttttcaaagatccttcaaaggccactgttatagagagtgtgaattggtcggatttctttgttcagcatgtctactatggaaataaggacaatatgaatcaattggctgtacataaggagaagaatgggactccggatgaagtttacaatttcaataaatcagccggaagtatcatgtttatgtatgacagcggtacaagttcattcagctataagggcgaaggaggcaccagatatgatgaacatataataatattctatgaaggagattattatgttggacttgattttgagtgctatatgaatcaaaacactccaccggatggagattatagcgattggatcgtacgaattgttccggctaaatatataaaagcccaaagaatcatggcggaagatcttacaatatctggtggagatttcgatttcaatgatgttgtatttgatgccgtaaccgtgaatggtgcaactgtggtgaccttacaggcagccggtggtacaatgcctttgtatattgaagacaatgaagtacacgaactgtttggcgtttctcaatccacaatggtgaatacttatgacaagcaggcaaaagctccggtaatattccgactaaagaacagatataacgatataaaagatatacccgttcgcgtgaatgatgtgatattgccggcagaagtggggaaagctccaggaaaactgtgctgcccgactacctgtgagtggactgatgaacggcagaacattgaaatcaagtatccgaatttccaggcagcagtggaaaacggcaatatcaattggtgggagtaatcagtaattctgctactcttcttgtgatagaatagaaaacgaaatctaaagaatatatttcccattcaacccggattctgatccggttgaatgggaaatttgttttgatgatagagattcatcaatgggtctttgtttgtcataagtttttagatttgtgtcaacatcaaatggctgaattccgtcaaatgcatatactggcaaactataattacaggatttttagtttcagtctttcagccggttcttctagtatctatatataggtgccattggatctatagatgcggcacgttggatctatagatgcgacacgtccgatctatagacccaacaggtccgatatataggtgggtcacgcctattgttgatgaacgacttaagagtttcgcaagtgtgcaacgagcggacttaatagaataataataatgatgctaatattctcattatgcaagcataaagatattattatgtgtattccgctaacatgtgcttgatgtaaacaggctcttctggctcaatgaatcctcattttccttgaaacaggccatctgtttgcctcgaactaaccatgtaattgagcataactaaccatgtaataaggtataactaataatgtaattgcgcacaactaactatgtaatttgcaaaatggctacaccttttgcccaaaagggtgtagctatcctgcaaaaagggtgacaccatccggatgaaagggtgtagccttctccaaaactggtttattctgttctatctgaacacgagccccagccatccggcaagtttcattttgcagtaatactgttaattataaagactatttaaagcggatcggtagataaaaagatcatagtgattctttttatcgcagacagcaatcattgtacgtttttgctaaacgttctccttgcgcttttcacttcttcccctccgacagtgctgaaagaaagcattctcgcacgttaggattatcaatttgtcaatttgatatattgacatatcggtcgcatcactgagtgattccgggatggttcagctcattcagcggaggtttcagccgcaaagcttataaatgaggcgattcgggaataggctgaagaactgaaagataaaaatgaaaataaaagtgtgtcctgacaaagtaagaaagtaattttactcaagtttagcatgtaacctttcaggctgcttgcgaaactcttgaataactttatagtcccgagttcatccgtcccaagttgtttttcaagtgttacctaataaaaccagcataatctgtaccaagttattttttagtcattactgggttggagaataatggatgtaacataataatatgccgaaaggggcgttgtttcatctgcattgtctgactagaggagaggaagaacaggtgtttcatatagagaatggagtgcaggtgtttgtcagcaatcaggcggagccggtgacattataataagctatggatacttatgataaaaatctcaacgcttgcctattgcatcggaataaacaactgacaaggcaactgaaagattatcagcagacattggctctaacggattgttcttcttctttaatgttggcgatggggcagttgttgagacttcatcggctcccatcttatggtcttgtgacgagtgaggaagaatggtgccactcccgatctgtgttgaaggctaaacaacgtattaagattaaattggctttatctgccacagatagtctggatatttatatacagaacctttcacgtagctgattggatggagaggatgacgaattctgaaagcttgttgatagaaggtggcatcttttgtaacgaaagatgccaccttctatataaggggattatgtgataaataaagtcttttataaggaaggtaattcaggagtacttatttcccagttaatccctaacgggttgttgtgcattctccatactaacgaaagttttggattatccagtatccacatttcgcatccttccacagcatctttcacatgaatgagtggataacccaaagctctctcattgctatccagaacggagtatgttgtctgattgtatacaagtgtattctgttccttcagctgtttataggcggagcgggaaaggaagtaaaccgtttcctccggagagagctgtacgtgcttaccgtcttccggttgcaggaaactgagctgtacggcctgctctatggacttaggtcccatggtataacttcccgattgccatttcaggttgcgttctattccccaatacagacagattgaatcctgcttttcgcggaaagacatttcatacttccgtgtctgtccgtgcagtttgaatacaaatagcagtgtatcgggtacaatgctctgtgccaacaggcttccggtgaagcccaggcacaataagacggatagaattatatgtttcttcatcatttcttgttttcttcgttcaacaataattgctgcccccattcacttggtttctttcccatcttcaggattagttcaccaccggcaatgatgtctttatgccgtatagctgagtaagggtaagccgctccgttcagtgtgacggattgtatgtatctgtttttgtccgaaagcccctgggtggaaatccggaaagtccttccgttatccaaccgaaagattgtttcttccaataaaggagtgttgatcagataataatcttgtccggcattgggatataatcccatcatgtggaaagcaagccaggacgacatggcacccgagtcgtcatttcctggtagtccgacaggaccatcgttgtagttcttggagatgatttcacggatacggtcgctgctccggtagggctttcccagccaatgataaagacagggggagaggaaagacggttcattgtttacattgaagaagcccttgtcgaagaaaatatccagacgtgtttcaaacttctctgcaccgccgcatttctcaatcagtccgggaacatcgtgcggaatactcagagaatactcccacgaagaagcttcatagaagaacatgtcccaccagggagtgtaccaggggccttcaaaggtgacgggggtataggtaaaagttggtttttgtatcttggattttccgaaagtgatttcatccagccaattgcccttttcatcacgaggcaggataaagcctttggcaccggcatgttcataatcgccacgccagagattcttccaatttccggattgtttcaggtagtgttggtaaagatcctcttttcccagacctttggcaaccagggcgatggcatagtcacaataagaatattctacggtgcggtttccggcgcgggggatgccgtaggggatatagccgaattccagataggggattagtccgccacgcccttccgcttcatggcggtcaccggggcagacggttgcatctttcagcatggcttgcagaccgagttcgtagtctattccttccagaccttttacgaaagcatcggctattacgatttcagcattcgaaccgccttgggtacgaccattgctgttaccgctacgggcgtcgggcatgtagccgtctcgtttgtagatgttgataagtgaacggacgatgtctgtttcacgtttcgggtctatcagggtgatgagtggagtagaagtgcggtaagtgtcccagatggcgtagaagtcatcgtaataaggttcgtcatctgcccagagaggattctctccactgcggtctacaggcataatcatggtatgatagaggccggtgtagaacatacgtttctgtgcttcgggggtgcggggagagatttcaattctttggagtaaatcttcccattgggccagtaactgtttgtgtacagtttcgaatgaccagtgaggaatgtcagtatgggcattctgacgtgctttcagtgagctgaggaaagagatacctactttcagttgtataacgtcttcagaagagttgaagcgcaacagggctccggtcttttgatgtgagtcgtattggaacttctcatctgtgatcttatcgcttttccaggtagctgtatttacgaaaggcttgtcggtttctgcgtaaaagtagactgtataggtacggccattgttccatccgccgcgaatacgggtgtagccgatgacttcatggtcggagatgatttgtatttcggaacctacgaattgctgagcttcgcgggcatcgggtacggggctttcacctaagaagaatccggcatcgatggccagtgatttcagggagtctttggggtaggtgaaccgatagaacgatgctttgggagcggtggtaatttctgtttgtatgccggaagactggaattgggtggagtaatatcctaattttattgtttcgtccttgcgatggtcgatgtgattgatgcggtccattccgttgcagaaaggcattacaaggatgtttccgtatttggggccgccacctgttccgctaacgtgtacttgggagaagccgtccacctgttcgggcatgggcaaccagccgctgttgggacgtggggtacagtccggtgagggtttcaccattccgtaggggcaggaaggaccgatgaagacacggcccagtccctcggaaccgataagcggatcgacgtaattggtaagtccggtatcttgtgcaaaagtatttgttgagaataacaataggaaggatagtgtgattagtttggttttcattggtagaagtttttgtttgaatgaaaaagccaggcactgcaactgactaatttgggtgtatcagttgcaatgcggggctttaggttttagaaactctaaaagaaaacaacagctcttttttatatatcgcctggtaaaatcattctgctttccgtattaatacccttcattttgattccagtttgtattagtatcaagtataccttgcggtatcgggaagatacggttggtcagttttgtcttagctgcgggattgacaatattcttgaaaccccagtcacgttcatactctccaaagcgaattagatcgttgcggcgccagttttcatcgaagaactcacgtccgcgttcgtccagcagttcatccaatgtagggttggagttgatcagaggagcatgtacataggtacgaatttgattgaacaggctttgcggagtatcaccattagtggcagaaccaccacgcaggatagcttcgcacttggtcagcagaatatcggcataacggaagatgggtacatcattactttggttgcgactgtattgattgtattccgttacgtaagcagcgaatttgatagagcgccaaccttgtgtccaaccggtgatggtggctcctgtgtttaaatcctcgtaagcaggacctataggatacggattgccatccttatcgtatagtatttttaatgcgatactctttgacaggttgactgcctggccttgatacatattacggtttcctgtcttttcggctgttgtagcgtctatctgatagaggtcacctcctacgacgcaatcgttacggcggtcaccttccaggcagaatagattggcaaattcttcggtcatagcaatgttgccacctacggaattgctcatggctacagtatagaaaccggcaccgccactaccgtcgttctgtccgcgtcgccaagtgcggaaacgggcataattcataccggtgcgggtcacacagtcgtaatccatggcatagatgaagtctttaatgtgcggaccgttgttgtagaggaacttggctttatagtcatcacttaaattgaacaagtcgctgcggataatgtcatcacaagcagcaatacagtcattcaatttttcgttagccgctgtagctgaccaatcggagcttgtcacatctttcgtgtatacgttccagttgatataaagtttggccaataaggcatttaccatccagcgagtaggtttaccgtaagtggcggcacttatttcagtggtcatgtcatcgcgtatagccaacaattccgattcaatccagcgggctacatcggcacgagacgaacgctctactgattcattctcctcgggagtacgttctaagatgggtatgtcgccaaaacaatccatcagaataaagtgatagaaagcgcgtgccgcacggacaggggcaatggcaataggggaggcttcgtcaccacctaattcgatgataacctggttacatttggtaattccacctgataaatctccataccagccgatacaagcatcattggccaatgaattgtgcaatgaggggtgagaattgttgcctgaatcaaggtagtcaccatcgaaacttacacccatggcctcatcggacgagaatgttactaattcattatagcggcgattcagaggaccggcaaaagcataatatacatcggaggttttggcctcgatagcgatttctgagtccggatattcagtatagaatgatttgacattcacatccaagtctgtgcagctgcttattgctaaagttagcagtgctgtagggaggatatattttttcttcatatttcttgcattttaggttgttagaaatttacgtttaagccgaacataaatgttcgtgtgcgcggatagcgggaatgacgtgcatcaatacccggagctgtacctcctaaagagatttcagggtcggtacctttatacccggtcagtgtgaatacattgttgcaagtggcatatactcgaaggctgtttacccaatcccccaacttgccgaagttataactcaaagtcagggttgagagacgtagatagcttccgttttcaatatatcgatctgatggagcttgtgaacggttgtctgtagctttctgctcagtaacaatatcggccaaaacgtttttacctgctgaaaccagtgatatattgctatattgtgcgcgagtggcattgtatatcttattgcccaatactccttggatgaatgctgttaatgaccagttcttgtaactgaacgtattgttccatccataagttagtttgggctgtgcattgccacatttcactttatccttgttttgcgggtctccggtagtggcctgtttaccgtcttcacctattacgggtgtgccatcttcattgaactgatagaatatggaggctccggagtcgtcataccctgcccatttccaagtgtagaatgtcccgataggttcgccttccataatgcgctgtacgttggcagtattgtatccgcctaaattcaagtatgctttatctaaataatttacggaataagtactgttggaaaggcttactacttcattcttattgtgtgataagttcagactggtttcccaagtgaagtcgcggttttttaccggtgtagcattgatggtaagttcaatacccttgttactaatctcacctacgttggcatccatccagccataaggaaaacggttggttgatactgcatatccattgattaaatctttggtgcgtttgtcgtagtattctattgtaccggttaagcggttgcctaagaacccgaaatcgatacctacattgaacattcctgtccgttcccattttagattggggttggcattacgagtggctgctaatgtacgataagcttgtgtgacaccttctgcattggtataattaaaccagccggatgcactgtaagtttgaagagcagtataggcattgaaccccagtgaattaccgcttactccataaccgatgcgtagttttaaatcatcaaatagactttgatctttcataaaattttcttcggtaatacgccacgctaatgaaacggaggggaatgtagcccagcgattgtttcgtccgaaagcagaagaaccgtcacgacgtacagtggcttggaacaggtacttgctgttgtaactatagtttatacggccatagaatgaaatcatgcgcagggtagaaagcctcttgttatcatcactccagattccgtctatgtccatattgttggccattcccaaattatagtacagcaaatcatcattatagaagttataggctgttagtccgaatccgtcattgtcatcgctttgttcccacgaataaccggccatcagacccagtttgtgtttttcggcaaaagtcttgtcatagttgaagtatgcttccaactgcttcttctgattttcaagcgtctggcgtgtggcttgcccgtggcgtgaagaagtagcggtcagctgcgaattgatagaattgtaattgctgtaaatccactgctggttttgcatagacatgttgaggttgaatttcaggccatctatgatctcaagggtagccttagcgatgccttgcagatatttgttcttctgtttgtacaggtcctcgtgaaccatagacattggattcatattctgtgatatgtcctggcggcgataccagcttccgtctgcattccttacaggagctaacggtgagtagtagtacatagcgtcgtacacactttcaccattatattcgccggtaggtacgctatttgcatcggtgatactggcgttgacactgaatgccaattccagacggtctttgagtgttttggtttgaacgaacgagcgggcggtgatgcgctccatatcgctacctcggataacaccttgtttgttcatatagttgatactggcactgtaggtggtcttatcgttacctccgttgatactgacattgtgattgtgcgtcaaggctgtacgtgatacttcatcctgccagttcgtgttagcaccttcgtcattcaatagtgttatattgtttgccttagcataatcgcgtagttcgttggctgtcattacatctaggcgcttcattatattgtcagcagccacataagcactatagcttacggtagtccgttctttgcttccctttttggtggtaacgatgataacaccattggcagctttcgaaccataaattgcggtagcggtagcatcacgcaacacgtcaatgctctctatatcttcaggggcgacaagtgcgaggtctacacctggcacaccgtctaccacataataaggttccatggcagcaccatcacgtagagaagatgaaccacgcagggtgatagaacctgtacccgaaggatctgacgtattcgtaacagtcagtccgggaactttaccttgtagcagctccgaaggtgaagaaaatgcacctttatttaattggtctgctttcactgttgtgatagagctggtaacatccttacgcgtcatgctaccatatcccactactactacttcatctaatgtttgggaatcttcctccattactacattaatagcgctttggttcacctgaacctcttttttagtaaagccaatgaaagtaaatatgagggtttgccctcttttcacttctatagagtatttaccgtcaagatcggtgatacaaccattggtggtgcctttttctaatacattgacgcctgccaatggctcaccggatttgtctgtaacagtaccggtaaccttgttctgggcaaatgctaaggtactacttagcaagaacactacaaagagcacgctttgcgcaaatgttctttttctttttaattgtacattcagcataaaataaagttttagttataaattatgttctcttcttctgtatatttataaatattattctggctgcaaaagtaggatgtacttattacagatatatttcaaatgtattacaaggttattgtaatgttttgatatacaattaattgagatggatggaagacaaaaggatatttgctttatattactatctttggatagatgtaatgtaaagaataaaggcggtcgttccatgttgtcctttattataagtgacaactttgggaaaaaacgggataatgtctttgcctccatagtattttagattttgattactgcaaatctaagccaatgaagttatagttagggagaaaatgatgcaaattagggggaaaatagtgaactattgtttttttttctggattatcccgcccagtcttctctatccagattcctgtatccgatggcttctgccaaatgtgagggctgtatcaggtcactgctttcaaggtcggcaatggtacgtgccacttttagtatacggtcataggcacgggcggaaagattaagcctgttcatcgcatttttcagtaaggcaagacctttgtcatccggacgagcatatagggaaagtagtttgctgctcatttgtgcattacagtaaacgcccggaatatctgcatatctgttttcctgaatttgtcgggcggagattacacgctcccgtatgatgaaacttgcttctcccggatgtgcatcggacattttctcaaaaggtacaggaactacttcaatttgtaggtcgatgcggtcaagtagaggaccagagatacgattcaggtatttttgtacttgtcccggactgcatacacaagcttttgtcggatgattgtaatatccgcaaggacatgggttcatagaggctaccagcataaaactggcagggtattccacattgcttttcacacgggaaatggtgatctttcggtcttccagcggttggcggaggacttccagtacgctgcgattgaattctggcaactcgtccagaaataaaattccattatgggcaaggctgatttctcctggttgtggataactgcctccacccgtcatggccactgtggaaatggtgtgatgcggatcgcggaacgggcgttttgaaataagccccgtattgttttgcagccttcctgccacagaatgtatttttgtagtttcaaggctttctcccagggacagcgggggaagaatggatggtaatcttttggcaagcatggattttccgcttcccggggcaccaatcagaataatattatgtccccctgccgctgccacttccagtgcacgttttacgttttcctgtccttttacatctgcaaagtccagatcaaacctactttgttgtacataaaactcttcgcgggtgttgacgatggtaggagtgagttcctgcttcccattgaagaattctattacctctttgatgttttcaactccatatacttgaatctgattgactacagccgcttcaagagcgttctgtctgggtactatgattccctcgaatcctaattcacgtgctttgatggcaatgggcagagcccccttgatgggttgcaggctaccgtcaaggctcagttcgcccatcatcaggtagcggttcagcttatccggttggattacttctccggcagcaagcataccaatggcaagtgggaggtcataggcggaaccttctttgcggatatcagccggtgccatattgatgatgatattgctggtaggtatccggtatccattcacttgtagcgcggaaatgatacgttggtggctttctttgacggccgaatccggtagtccgacaagatagaacatacaacctcttgaactatttacttcgatggtgatgagagttgcgtcgatgccttgcacagccgctccgaaaactttgattagcacgtgtttattagtgattagtggtgagtgatttctccttttctttttcagcaatctcttttagcttgttctcaattgctttttcatccagatttttaccttctattcttcccgtaggactgagaagtatattggtaggaagcgtctgtatggcaaattgtttgataatctctccgctccagccggagaaatcacagacttgttcccatttcagcgtatccgctttgatggtttcctgccatttctttttatcaagatcgagagaaacgcccagcaatgcgaagttcttattcttctgctctttcttataaatacggcggaacatggcattgtttgcacggctgaccgtatcccacgaagcccagaactgtatgagcaggtactggtctttaaagttggagcgacttatatctttatcttccgcattgcgcagtcggaagtagggtgccgattttcctacagctactttttcttcttctttaatccggtttagtaatgcatccataaaggggcggtccttcagttctccggtcatacggtcggccagtttctggatttgtgtcaaatcgggttgagggttttgcacaaagtatttatccagcagatagatactggctaatgaagcaggatgttcagtaatgaaattctccgctttctcttccaaagcttttccggacggggtacccaatccttttagttcctggttgaagtctgttaattctttattgggggcattgccgctgatttgtaaagaggatagttcggccatggagccttttatttgtatcttattccctttattcaggaaaagcggatactctgttccatcgctgaataataagattgtggtgactaacgtatcagcagaaagtgtcgcggagaatttatctttttcggcaatcagtgtatccatgcggtcatgcattctgtccgcaccatataaatagatggtatcattccccaatcctttgatttctccactgaggctgatactatcggtcttctttccaccacaggcagagaggccgattaatagaagatataatagacagacgttcttcatctctaaatacttttttgcgaaagtacggcttttgcagataataaaaaagaaatgcccgacatttctcaacgccgggcattctacagatatttatttatttactacttaaaatcactaatcgtaattagtgaagagcttcttactgaatgatgctcatgaaatctgcattcgtgaagtacttagcaaattccagatcagaagctgctttcttagctaatgaagaatctttagctacagcgctcttcaagctgctggtaaccatagaagaattgttagttcttgcacctaatacagccatcaggtactcagtataagcgtctggcttttctacacttgccaaagtatttttagctttgttgtagtccttagccaggatctgagccaaagcagcactgttagatttcgtgttgccgaatgcgcttacagctctgtcatattgaccttgagcgatgtacaggttacccagagcttcgttcagttcttttgcaccggaagctttactcaggtaagtttcagcagcggctttatcaccttttgtcaaagcgatcaaaccaaggttcatgttaacttcaggagcatccttgatagaagctgctttcttgaagtagctttcagccttgtcaaggttacctgattggtaagccagtttacctaagttgttgtaagcacgatagtcgttcggataaatctgagtagctttagtgaagattacttcttgtttagccggatcgttagtcagagtagctgcgtacagcaattcttccagactcagctgcttagcatctgtgttagccagattagcgatttcatcatcagacttaccaatgatttcataattcaaagtcagacgagaacgacgcaattgcggcaagatttcgtcagctaagttcttgtaaacagaagaaatgttcttgatttcctgctctctttgttcaggatcagaatacatagacagaacgcgaaggatcagttctttatcttggatattagatttagataccaattcctggaaaccttcccagtcctgagcagtatattttgtatcgattgcagcgtcaatttttgctttcttcaagttctggttgataacctttgcagtgttgtcctgacggttttcggccaacttagtgttcaggcttacaccgccatcaggagatgcataagcagaaacttcgatgttgctgatcttcttgttaacagcaccgtctacgttcttcacttcttcgttgaattccttagcggtcttcaattcaccggcgcggacgttagcttgctgaatcaagaacatgatgttagcatcgtgtttctccttgatgatacgttggaaagcgtcgtcaccgttggcaggagtagcgctgctcagcgtctgctcaaccatttcagaggtagaaatcacaccatcagctactttcacagcaggaatagttactgttttgttaccgattgtggctttaaattccagatataactctgattttgccatttcgggaacatagtcgaaagaagtcttcatagtgtagttaccacccatcttgtatgagatggtctggtcgttaccttctactttttctccttggaatacggctgactgtcctttagcttctccaccgttccatttcagaaccggagttacttctactacagctttcttgttaaaatacttttcagggaattttccgttgatagtggcgggaactttgccacctacagcttcaagaacctgaggggttacggtgaaataatcagaagataattcacccattttgctgctacaagatgaaaatgcaacaaccagtgccattaacaaaggcagatacaatctcttagtcattttaggtataaattaattgtttgtaattgaaattagtctattggtttctctcagtgcctattaccacatgataatagcctcgcaaagatattaaatctcccggcacaatctgaaaggaatagccaattttattataatttaatgaaatcctgtctcttttctgtacttgatgttccttggatggtgttcaatgatctcactccgcaacatattccggtcgatatgggtataaatttcggtagttgcaatggactcgtgtcccagcatacattgtatggcgcgtaggttcgcgcctccttccagcaagtgggtagcgaaggaatgacggaaggtgtgcgggctgatatttttggtgatgccggctttctctgccaactccttgatcaggtgaaaaaccatgatgcgggagatgctatttccccagcgggcaaggaatacataatcttcaaatcctttctttattttaccaagattacggtcgagcaaccaatattttatttctttgatggcacgtggggaaatggggactaatcgctgtttgctgccttttccttctaccttaataaaaccttcatcgaaatagagctcggacagcttcagattacaaagttccgagacgcgcagtccgcagctgtatagagtttccagaatggcccggttgcgctggccttcctttttactcatgtctacagtagctatgatggtgtctatttcttctacggtcagtacttccggtagtttaaaacctattttaggaccttcgagcagttcactgggatcatcttcccgatagtctgccataatcaggaagtggaagaatgattttattccggacatgatgcgtgcctgggagcggggatgaatgccgatgtcatgcaagccggcggcgaaacgttgcaagtcgtccagagtgactgacagtatatcaatattctctgctttcaaaaaacgcagcaatttatcaagatcggtgagataggcatcaagcgtattggcagaaagtgctttttctaactttagatactgctgatacttcctgataatcagtgcttctttctccttatttattgttttttcgtctaatttcatttcttttttctacctttgttccctgaatttgaatgttttccggaacgtatccgatccgtatctgccccgtatctgctccgtgtctataggcttggacttactacggacctgatacggagctgctacggacttactacggagcaggtacggacttcttacggagttgctgcggagctatagttccggaacaaaggtataaaaaattgtgttatgaggatacaaattattaatggcccgaatatcaatctgctgggcaaacgtgaaccttccatttacggcagtgttacttttgaagattaccttgtcgaacttcgtaagaagtatactgatatacaaatagactatttccagtcgaacattgagggagagctgatagacaagattcagcaaaccggttttgatgtagacggaattatcctgaatgcgggtgcttacacccatacttccattgctttgcaggatgctatccgttcagtgacttctccggttatcgaggtacatatttctaatgtgcatgctcgtgaggctttccgtcatgtatctatgatagcttgcgcctgcaaaggcgttatctgcggtttcggattgaactcttaccgcctggcgctcgaagccttgaccggcgacgagtaattcgtaattcatgatttgtaattaaacaaaaataggtataagattatgttattgaaacagacaaaaatcgttgcaaccatttctgataagcgttgcgatgttgattttataaaaggcttgtttgaagccggtatgaatgtggtgcgtatgaacacggcacatctcggccgcgaaggttcggagatgctgataaataatgtgcgtgcggtgtccaaccgtatagctatcctgatggatactaaaggtccggaagtgcgtactaccatctgtgccgatcctatcgcttacaaagtcggtgacagagtgaaagtcgtaggtgacccagatctggaaactacccgtgaatgtatttccgtttcctaccctaactttgtgcacgatgttgccattggcatacacatccttattgatgatggtgatctggaaatgattgttgtggataaaacggaagatcatttggtatgtgagatacagaatgatgctactttgggaagtcgtaagagcgtaaatgtgccgggagtacgtatcaatcttccttctctgacggaaaaggaccgtaccaatattctttatgccattgagaaagacatcgactttattgctcactcttttgtgcgtaataaacaggatgttctggatataaaggaaattttggatgctcatgacagtgatatccgtatcgtagccaagatagagaatcaggaaggcgttgataacattgatgaaatcctggaagtggctgacggtgtgatggtggctcgtggtgaccttggtatcgaagtcccccaagagcgtattccgggtattcagcgtttgctgattcgtaaatgtatcctggcaaagaaaccggtaattgtggctacgcagatgcttcatacaatgattaccaatccgcgtcctacccgtgcagaggtaacagatattgcgaatgctatttattaccgtacggatgctttgatgctgagcggtgaaacggcgtatggtaaatatccgttggatgccgtgaagactatgacaaaagtggctgcacaggcagaaaaagataaattggctgataacgatattcgtattccactggatgagaacagcaacgatgtgactgccttcctggcgaaacaagctgtaaaggctacttcgaagttgaagatacgtgcgatcatcactgatagttacagtggacgtactgcccgcaaccttgctgcattccgtggtaaatatccggtgctggccatctgttataaggaaaagacaatgcgccatctggcactttcttacggtgtggaagctatttacatgccggaacttgctaacggccaggaatactatttcgcagctctgcgtcgtctgctgaaagaaggccgtttatcagaaactgatatggtaggttatctgagtagcggtaaagccggaacacatacttctttcctcgaaattaatgtagtgggagatgctctgaagtatgcggaagaaagtgtattacccaataaaaacagatacctttaataaattgacaattgacagttgacaattgacaattagttgcgccgttacgctgcatagtaattgtcaattgtcaactgtcaattgtcaattgctgattattatgaccatagacgaatatatcttgcagcatattgacgatgaaggggactatctgaaggccctttatcgggacacacaccttaaactgctttatccgcgtatggcatcgggccatttgcaggggcggatgctaaagatgtttgttaaaatgatacgtccccatcgtattctggagatagggacatatagcggttattctgctctttgtcttgcagaaggcttgccggaagacgggatgttgtacacgtttgagatcaatgatgaacaggaagactttacccgtccgtggttggaaggttccgagtatgcgaataaaataaaactctacattggtgatgcgttgcaattagtgccgcagttgggcataacgtttgatttggcttttattgatggagataagcggaaatacgttgattattacgagatggtgctttccaatctttctgacggaggttatattatcgctgataataccctgtgggacaaccatgtgctggaagaacacccccgcaataatgacttgcaaaccattggcatcaaggctttcaatgaacatgtagcacatgatacacgcgtagaaaaagtaatccttccactgcgggacggattaacaattatccataagaagtaattcaggatatcggatatgtgatagagacaattctttcctctcccttttcttctacttgataactccccttgaacgtttccacatagagacggttgatattatgcaggatatgttgttcctgttcgtcctcccaacactgataaaggggactttgcaggatgattattttcaggtatttgtcttcctggcttaaagtatattccacttcgcgtttctctcctttatattcttgagggactgataagagtgaagtaagtaatttcaggaaccatttactgtcagcctttatctgcaacatttccaattctgtattgaaggttgatttcacaatgccgggagtctccatatccacaatcattctggtttcccgacatagttgaacggcatcgcattcttgaacggtgaagtgcatcattcctgcttcaaggcgtgataagtcgaggatattgtttatgagttttagtagtttcgttgagttgctttttacagcaattgaatactcttctatttcttcatccgttaagtcattttctgaagatagtaattcagaaaaaccgactacagtgttcaagggtatacgtatctcataggtgatgttatggaggaagcgttctttcatcttgtcagcggcttccattctttcgaaggcttttcgggtttccttctctgcatgccgtaactgacagcgaatatgataggcacgtataatgacaaaaactaatattagtaatataattgtacctgcgcctacctgtatataacgatatcgtttggtcagttcttctttttcaagtaaagctctccggattttatagttggcttgatgggcttctttgtgccgttgtagcatatcctgattgagagaatccccttttatggctaccattttatacaggttggcagcatctttataacgtccggtttccagcaaggcgtctgcttttgatttgagtaagtcgttttcgttgaaaggatccgttcccctacaggcggccaatgccaggtcaagctcccggaagcatttatcccactctttagtgagcttataataaaatccccataggctgtggtagtttatataggcaccgagatacacattatcgctataatattcttctgcctttttcaggtgctggattagtttttcctggtcttcagtaatcatatagattttgcaaaacgatgtttctatttccagaaatattgttttgaatgtgtctgataggggaagtcctttggacacttttgtgagaacatccagttgcttctgatattcactgagggcttgcggatatttttcctgttttttataaagtttagccagatttccgtgtattattaatagtccattttcattggccgtaggattattctccaaagcctgtttgtatatttcgatggcctcgtcataccgtccggcaaaattataggcctgtgccaatgcaagagccgcgatgaagttgccttttttataattgaggcgggtggactcatctctcatctcttgggcttgcataatggcatattcggtatctcccagcgcacatcgtgcctgaagtacggaaagccacatggtatagtaaaatgcataatccttatactggtagctggcctctttcagtattaaaagccttttttgctgattgaaaatatctgcaagatattcatattggcggcaatagtcaaaaagtgcccataactcttcttcgtgtatttgcttccggcgggcaagcacaattgcagaatccagatattcggtagccgattcctgaccaatgtattgctggaatgcatttctcagaaatatgcagcggatggaatcattgggtatggtagcggctgtctggaatatgctgtcgcgcgcttgctgcttcgtagatgcatgtgtttctgtcaggaagggtatgtctgccagaagcagaataaggagaattatttttttcatgctttgcctgcttgttttaatgggtgagtgaagatgaaacgcgaaccgttcgtatattccgggtctatccagatatttccaccaagttggtcaataataaactggcagatagataaaccgatacctgttccctgggatttctcgtctacccgttcgaagcggttgaatattgtaggctgcttttccaatggaatgccacaaccggtgtctgtaactgagaattgcgccataccctcttcattttgctctaatcgcaggataatactgccttctttggtgaatttagtggcgttgactaaaatgttgatcagtacctggggcaggcggaatatgtctgtttctatttccagagaaggcagtgttgtttcgaaagataatgcagcctgtgtttgcttaatcccttctacggtttgaatgattccttcgcaaagagggacggcgtcgcatacctttaggtcgaacttcatgttctttatgtccaggcaggagatatccactacatcgttgagcagattgatcagtaggcgggagtttaactgaatgatttcataacattgtttccgggtatcttcatcaataccgggggtggtcagtacttcggagaaaccggacaaggcatttaagggggtgcggatttcatgactcatgttcgaaatgaacaggcttttatttcgcgtggatttctctacttcctcttgtgcctgctgaagcttcagttgcgattgtattagctttctgcgttgttttcttaaatatacaacgcagcctatggcaatggcaataaaaatcggaaggatgatgagagctaatgaaagcagacggttctgttgctggctgttggcaagttccagctcatcgattgagtagattttccgcatatcctttactccacgggaattgatctcctcataaacggtatctgatttatgacttaattctttatacaattttgcagcttcttcatactgctgttcctgcattttttcatctgcatctttccagcggatatcctcttctgcataggcaatggatgaaaaaaatagtagtattatccaaacgtgtactttcataaagtaagctattttgtgatgttgttgcaaatgtagtttttaattaatgaaaagctacgttttggtgctaaaaaaagtataaatcatgagtctaacgagatatttgcgtaactttgcctttaaatatagataattgatttatggaaacaactcgtcagaataaaatagcccgtttgcttcagaaggaattgagtgatattttcctgttgcaaactaaatccatgccgggagtactgatctctgtcagtgctgtgcgtatcagcccggacttgagtgtcgcacgtgcttatctgagtatcttcccttcggaaaaggcggaagagataataaagaatgtcaatgataatatgaagtctatccgttatgagttggggacccgtgtgcgtcatcagcttcgcatcattccggaactgaagttctttgtggatgattcactggattatcttgaaaaaatagatgaattgttgaagtgaaccttcccttctacatagcccggcgttatctcttctccaagaagaaacacaatgctatcaatatcatttccggcatttcggtgtgcggagtggcattggctacgttggcgctggtctgtacactttccgtattcaatggttttcaggatatggtagcagggttctttacagcctttgatccggaattgaaaattacgattcgtgagggaaaagtctttgaaccgcagggggcagcatttcaggaagtgcgctctttgccggaaattgctgtctggacagagacgctggaggagaatgccatggtgcaatataaggaccgtcaggctatggctattattaaaggggtggaagataacttcgaggagcttacgtttattgatagtttgctgtatggtgcaggtgagtttatcctgcatgactctatcgtagattatggcgtattgggtgtggaattgatatctgagttgggaacagggcttcagtttgttgatccccttcaggtgtatgctcccaaacggaatgtacgcgtgaatatggctaatccttctgcttctttcaatcgtgattaccttttttctcccggtgtagtgtttgttgtcaatcagcagaagtatgatgcacgctacattcttacttctcttagctttgctcgtaatctttttaattatgacacggaggtgtcagctgttgaattgaagttgaagccgggggcggatgttacggctgtgcagagaaagattgcccgtatcctaggtgatgaatttgtggtactggaccgttatgagcagcaggctgatgtattccgtattatggagatagagaaattcatatcttatctttttctcacatttattcttgcgatagcctgtttcaatgtgattggttctctttccatgttgattctggataaacgcgaagacgtggagactctgcgtaatcttggagctgatgaccgcttgatagcccgtatatttttgtttgaaggtcggcttatttccctgttcggtgcactttccggtattgttcttggtctgttgctttgctatattcagcagcgtttcggcattatttccttaggtggtggtaatggcagctttattgtggatgcttatcctgtcagtgtgcatgtaacggatgtagtactgatatttattacggtggttactgtcggattcctttcggtgtggtatccggtgcactatttgacgcggcggttactgaagaaataatgtctgttgacgcaagtgtcgaaccactggttttgtactcaatctagccattagtgtattcattttgtattttgtgggtttagatatcattctggcaagaacccatatatgtatctgttgttgagttcctatatttgcatgtagagacaatttgagaattgttttcaatatggaatgtggcaaagggaattaaaaggttttgttctctttgctgcaaagaaatgcaatgattaatagaattcacctaaaaatctttttatttatggaacgacgcacctttcttaaaattttgtcatcagcaggtatcgttagcttggttagtccaacttttgctatggaagtttgtaaaaacaaggtgtctaaatcttcttcagctcttctcgaatcagcttttcgtaatccgcctttctcttccggagtttatacatggtggcattggatgaatggtaatataactaaagatggtataactcgtgatcttgaagccatgaaggcaaatggtattgcggggtatcaattgtttgaagcaggaagcggcatccctattggtccggtagaatcgcttagtgatgaatgggtagatcttattctgcatacgctcaaagaatcagaaaggttgggtttggagtttgcaatgcacaactgccccggttggtcatccagtggtggtccgtggatcactccagataaagctatgcaaataataacgtggagcgaaaccaaaataacgggtggaaaacaagtcaggattcagttgcccactcccaaacatatgtttgattattacatagatacatattgtttggctattccggcaaatatgaaagtaatacccaggttgtcaattcttgaattatcaaataggcttgataaggatggtgttttaacttgggatattcctgctggtgagtggctgattatgcgttttggacaaacagccaaagatcagaagaataagtcagctccctctaaatcaaccggattagattgtgacaaattcagtacagaagcactggattatcatttgaattgtatgtttaaaaggctgatgcctacaatggagaaaatagccaaacattctaagatcggtttgctaatagatagttatgaaacgggtgaccaggattggacttctgacatgcctgcctattttgaacaaagtaatgggtatgagctgtatccatttttacccgtattagccaataaaatagttgagagcgaggaaagtacaaagcgtttcctgtttgactttcgtcgagtcagagctgatatgtttgctgaacgttactatggtcattttcaaaagcgatgtaaagagaagggtataataacttatactgagccttatggaggcaatatgatggaagaattacaggtggcacaacagcttgacattaatatgggggaattctggtgtggtcagactgtactttgggcaaattataagtataatcgtaccgtcaaacaagtagcttcaatagcacatacgcttggtggaaaggtagttggcgccgaggcttttacttctgaaccggatgcggataaatggttgcagtatccatatgctctaaagtcattaggtgattatatgtttacccgagggcttagtagaatttattttcatagatttgcccaccaaccacaccctactgctgctccgggaatgacgatgggggcgtgggggctacactttgaccgtaccaatacatggtggaaaccgggaaaagcatggattgagtatttgaaccgttgccagtacattttccagagttcaactttctatggtgatattctttatcataatggtgatgatagttttggtagcactattgaaccggaacaaaccctactggcccctccggaaggatatgattatgatatggtaaatactgaaatgctggacaaagcacatatcaaggatggaaagattctttttcccgctacacgttttgatggctataagctcttagtgttgcttaaatcggaaacaatgtcattacatacgttgcggatactggcccgattggtaggtgagggaatggtattggttgggcaaaggccactgcataccttaggtttgtgtgatggagagaaagagaatgagtttgctgcactggtgcaaagagtctggcagcacccgaacgtgcatgaaggaaaagatttgcaaaccatttttaaccggttaggtgtgtctcccgactttgtttatcattctgaagcaggaaattcatctgttcatgctatccattatcaacaagaaggagccgagatatactttgttgcaaatcgtaagcgagcgcatgagaaaggaacggctcatttccggataaaaggttatattccggagttatgggatccttatacaactgaaattctacagtgtccggtctatcgcactgataacgagggcgtagaaatacctcttaatctaactcctgcaggatccatgtttgttgtttttcgtaaagttgagaaacaacggaagtacacagatgtgaaatacaatggtgtttctttgtttccgactattggaaatgtagtgaaacaggattctttgtctgcaaattttagtattacttgttggataaagcctgaggtggatatagccatgacggaagaacaggaactcggtgatatgcgtgcccgtttttttgctatttatcctttggaaggagagcgacggcatgggaaaggacatagttcccttgggttgtcagtaggtcggaatggagtcgttgtctatgaacggactatacataataaggctgtataccgaaatcccagaccattatcgggatggactcattttgctttagtttatcaggataacacaccgcatctttggataaatggagtatatgccggagcaggaacaacttcagacacaatcgtgcatcttgaaacatctcattcggatttgttgtgtaaagcggatgcttatgaaggaggactctgcaatctgtgtatccatccttccagtattgacaaaacagaaataacaaacctttatcaaaaagggatacctgctccgtttcatccaagtgagcaggtactttcatggttacccagtcatcggtttgttgcatggcaggctggtgtttatgagtttattgcagaacgtacaagtatccgtaagcatgttgatactcttcctacatgtattccgttaaaaggcccttggactgttcgattccctcaaaatatgggagcatctgaggaaataactttagccagattgcattcattacatttagaagaggattttggggttcgtcatttttcgggaacgatgacttatctctattcgttatctataaataatatctatttgcaggacgatatttgtttgcgcttggatctaggtcgagtagaagtacttgctgaagtgttggtgaatggaaaacgtgctagtatgtgttgggcacctccttatgccattgatatacagcagctattgcacgaaggagataatctgatagaaattcgtgtaacaaatttatgggtcaaccgattgattggtgatgagtatctgcctgaagagaatgtttataattatcaggatattccaaataaatattctacattgcgcaacggtggtatcaagaaacttcctgaatggtatctacagggtaaaccaaagcctgcaggaggtagaattgcatttacaacttggaaacattatgataagacttcacctcttgttgaatctggtttattaggaccagtcaccttaacagttgggaaaatagagagtctgaatatatgaggtgctcactgaatataaatttgaggcaagaatgaatattattttcattcctgccttaagttttggtgtatatacaggctctttttagttgagagaatcgtctttatatttattgctctctctgtattccttgggagtttgattgtatcgtttgccaaactctttatagaaatgtgaccgatttgtgaaagctgtccgatacatgatttcctgtatagtcaatgttgtagttaatagtaatttggcagcataatttattctttgttctttgatgaaatctttaggggggagttgatccagattcttaaacttgcgatataaatttctgctgctggtttgcatggcttctgcaagttcttccggaccaaattcagtgttgtccatattttcattgattagttcgacagcagtttccatgaattttttgtcttcctgttgtaacaactgtccaccactaaattcaaaggcacttgctgaagagttgtagtattgctttaattcttcctgcttttttaatagttgtttgatgatactcctaagatattgagtattgaatggtttggggatgtaagcgtctgctccagattctataccctcaattttttcatcggttgtattttttgcagagaggataattaatggaatatgcattgtatgtttgttgcttttgagttgtttgattaaggtgattccatctattttgggcatcataatgtctgtaatgataagatccggtgtcttttgttttaataaaacaagcccttcttcaccattttctgccgttaaaatggaatattcatcggatagtatatcttttagcatccacagtaactctttgttgtcatctatcatcagaatggttgtttctggttgtttgaattccttttcgtaatcacctctttcagctgtttcaatattcgtattgttgcttagaggttcggatttaggagtttcattcaatacatgttcggcttcttctgttacttcaagctgtggtaggttcactatgaactgagcatattggtctatttcgctttttacttcaatagtaccttgcagtagttctaccatactttgacaaatggcaagtcctaaaccatttctggaagaaagtcctttaatgctattctcctgaatgttatcaagtatactgtaccggttaaatataagtggaatattctctttacaaattccttttcctgtattatagacttgaatatttagtttatctacctctatttttatggatatacgtattgttccattttcagggctatatttaaatgcattcgaaataagattatttagaatcttagtaaatccgctataatcactcttccatataatatctggactgatatttgtttccagatggatttgattttgttctgccaactcaccaaatgaatctataatgtcttttgctaatttgctgatattcagttcttgtatatggcatatttgattgccggtttccatgcgacggaagtctattacttcttgtatcaggctattgagacgctctgtatttgattttataatctgggcatattttttaatgaaaacatcactgttctcatgctgcagaattctttcgcatggaccataaatcagggtaagtggtgtacagaattcatgtgtgatgttggtaaagaaacgtagtttaccttcatacatttcttccttatatttttcatttaactttttggacatggcggcttttcttcgttcgtatttccgccggatataatgccaaaatcccaatcctaccccaataatcaataatacatatattatctgggctgtaatactctgataccaagggggaagaatgatgatacggatacttttgattaaattgtcattgctatttcctccatcattgtattttactttcaatgtataatctccgggagggatatttgtaaattgcgcttcattagagcgtgtatccatccatacattattgaaattttcaagtttataagaatatctgcagttctcgccattaataaagtctgtggctacaaaagaaactgcaaagaaattctgattatggttcaacacgatattttgagaattactatcttttttttcaaactcatgaatgttatattccttattgaatattcttacttttgtaaagtgaatatcaggcacaaagttttttttcttttttttctctttttttatccagactacgccatttactcctccaaaaaagtatctgttgtttattttgtcttgaaaatatgcattatcactaaattctgttatatctaagcccgttctatgattaaagttcctgaacgtattcttttgggaatcaaataatataatgccggtattgctgcttaaccatagatgtccttctttgtcttcaataattccgtgtattgtattattgggtaaaccttcattctcattaaaattcttatagtcataattaccattagatgagattttcagtttggttaatccataacttgtacctaaccatatatcttcatgttggtcttgatatatgcataatatatcactcatgggggctataccatttctatcaaaagaaatgaaagaataattttcagtgcgagaatttaatctgatgaccccattaccacgcattccaatacaaataatggagtcattttctggatatatagaatatatttgattgtttttctgtttatgaggaacatcaaaattgaatgcttgaatctttttagcttcaaggccttgtttctgttgttgaatgtttatttttaataaagtatttcctgcacctacccacaatagtgagtcgtttgtttcacacatggaatgtacatgggagatatcttgattagtattgttagctaatgagtgaattttattgtctgaaaaagagtagtaatttaatccaggtccatttgaaccgatccataaaattggatatacattacttggtgcaaatgcaaaaacttcattattcgtaagtccttcttgtgttgtaaggtgtatgacattatcatttgaatactcttttgaagtatcataatggttgatctttattataccattgtctttggttcctaaccatagagtattatatttatcagtgtaaacagcgcggatcggccttttcttgctgatcggaagttcattgagcaatatattagtaaatgtatattcgtcttttgtccaggcatataccccctgcccatctgtaccaatccaaataatatcttgttgtttatctttccataaagagaatataccacaattaatgttgaacttctctgcttggtaattttgttcagccataagtcgtataagaccatttgtctcaaatccgataagaacatcgttgtcatcaaaaataatggctccaattttaccactttcctgaatcaattgctttagctttctgataaaatgtagttttcctttttctttgtaaaatatgtttccttcagaatccaccataattattttctcgtcactgtaaaaggcatattttataaggtggggatgtgtaaagtccggatgtctgacaatttgaggattatttgtttttttcccggatatggtatacctttccattatacctttatgattaatccatatcgtatcttgagaatcaacaataaaacttgatacattgtctaattctttctctttatagatagggaagtttataaatttattgtctaagttcgaatatagagataatgtatttggtctattgaatacatataaatagtcttgattgtctttggcaatatatgaattttcaccaaattcattataatattcctctattgcattacttttttgcgatagtttgtttaatccccatttagtgctaatccataggtagttatctgtttctatgatttttctgatgacattgcttgaaaggctattttgattattgatatctggcttatagacatatattttttgactatcatacatgttgagtccatcataagtaccaatccataggaatcgtttctcatcttgaaataagcaagttacggaactgtttgatagaccgtcacgattactaatttgcctaaggttatgtgaactgatattttgtatagaacaaaatagtagcaacaaagatatttgaatataatatttcatgagtagtagtcttcttggcattaataactttaactggtcaacaaagatagtgctctgatcgagttttcccaaattctatttggttgaatttctattttaataagatgagatttagttaaaacttaagttttatgattgaggggataactcccgttaaaaggcagttgtattcgatttcgccataaatgtattctctttgcgcattgcggatataagcatgatattggcgagatcttgtatatatgcgtatcgcttatgcgctaattttgcatgtagaaacaacattaaacgttttcaatagtgtattagtttttttatgggtattgagaaaagatactatattattaatttctaaaaataacgatgaatatggaaaaacactctttaatttttggaggtattgctaaaaaaatatcattagaatactttttgataatttgagttttggtgaattatgtatactgatactttaatggtatttatctttttaataaatgccttttaaaaatagaaccaatttaaaatatattaatatgaaaaacatttttatgctaacaaacaaaagtgaacgaaaaataggaggaaaaaggttttctgtaatcctactattgttgtgtttatctctgtttactgtttatggtcagggaaagaaaaatattaaaggattagtcactgatgagaagaatgaaccgttaataggagtcagtgtagtggaagttggtacttctaatggtacaataacagatgtagatggaaagtttgaaataaatgtttcatcaaattcgactttaaagtttagctatattggttacaatgttcttgagaaaaagattggtacgcaaacggtgatgaatgttgttttaactgaggctgcctcagaattggatgaggttgtagttgtaggctatggaactgtaaaaaagcgtgatttgacaggctctgttacttctgttgattctgaaaaactcttgcagagtccggcattatctgcagcggaggctattcagggtaaagttccgggtgtattgatacagaacacaagttggactccgggagctactccgtctattcttattcgtggtacacgttctatcaaagcaggcaatgatccgttgtatgttgtggatggtattcctatttcaacagctcctaatttgtttgcgcctggtgatatagaatcaatagaggtgcttaaggatgcctcagctactgctatttatggatccagaggtgctaatggagttatcataatctcaacgaagaaaggtaagaaagggaaagtgcaggttgactataatggctattatggtattcagaccattcaaaacaagttggaattaatggatggagcagaatatgcggagtatgtgcgtgaagcttatagagcagctggacaatacgattcagcactgcctaatatggaactggataaaacattaccctcgtttactggtgatgattatacttggcaatctattgcaatggcttatgatgaaaacggtaattatgattccagcaaagtacgttccggtgctttgtggtggaacgaagtagaacgtacaggtatagtgactgatcaccaactcggcattagaggaggaggtgataaaatgcagtttgcttttaatactacatacttcaagaatgaaggtatttataagaatcaagattactcgcgctatacagtaaagttgagtgttgatgcagaagtaactaattggttgaagataggcggacagtcacacttcagtcattcattacagaatagaggttctaacttccaggattgttggcgtgtgaatccacttggacgattgtatgatgatgatggagttcctacattgatgacttcaggaggtgattctcaatggtggaatcctcttcaatacttagaacctaacgcagtggttaatcctttgaaaattaaccgtttcttaggtagctattatggggaaatcaagcttccattagatgggcttaagtatcgtgcaaatattggaattgattttcattctcgtcaggattattccttcttatcttcaaatgcaagacagggcaatcctaatcaggcaaaaaatgctactcaacaaacttatgcttatacctttgaaaatctgttattttacgataagcagtttggaaaacactctatcggagttactttattgcaatctattcagcgtaatagaaccgaaagtttaagtgctactgttcaggatttaccttcggatgatctgctttttaatgatattgcatcagcattggatataacagggtatgatagtaataatcaagtatggagccttgcttctttcatgggacgcttgaattataattataaaagcaggtattatgctacattctcaatgcgttatgatggctcttcgcgtctagctgatggacacaaatgggtttctttccctgctttttcgttagcatggagagtaaatgaggaaaactttcttaagaattttgataaacttgataatttgaaattgcgttttggatatggtgtaactgccaacacttctattaatccttatcaaacaaaaggattgttatcaaagaagtactataattatggagaaaatatggttattggttacacttcctctagtttaccggataaaacattgacttgggaaactaccgggcaatggaatgtaggggttgatttcagttttttccgtggacgtttgagtggaacagttgatgcttatctgcaaaatacacatgatttgctgcttgaccgtcagttacctgctgtctctggctatacgagtgtacttactaatgttggtaaaacaagaaataaaggtattgaggttagtttgtctacggtaaatatacaaaataaagatttcacatggtctacagactttatgtattcaactaataaggaagaaattgtagaattgtataatggaaaagtagatgatataggtaatagctggtttataggtgaagcgcttggagtatattatgattataagaaaataggcatctggcaggattctccggaggatcttgctgaaattgaaaaatataataagaatggtcacaaatttgcaccaggaatgattaaattgttggatatcgatggagatcataaaattaccgcagacaatgatcgtatgatccttggacaaaaacgtcccaaacatatttttaatcttagcaatacatttgtttataaaggctttgatctgaatattgttctttatggaaccttaggcggaatgttgagaaatgcagttcgcgtgaatcatcagtcctatcgtaataatagtgtgaaatttgattattggactccaaacaatccgactaatgcttatcctcgccctaacagactgtatgataatatagagtatgagtcctcattgtattatgaaaaatcggattttttacgtgtaaaaacgataacattagggtatacattacctaagaatctggttaataaagcaactttatctaattgccgattatatgttactgcccagaatcctcttgtatttacaaactatacaggagtcgatccggaaggagcagcaacttatgcttcaccgagtgtaagcagttggatatttggtgtgaatgtttctttttaaactaataaaataagaataaaatgaaagctgtaaaatatagaaaaagtatcggcataattcttacgatagcttgcgggtttacctccctaacaaatactggttgtgatgattttctctctgagaaagaagttccccgtatcacaagtgatttttataaaacagaacaaggcatactggctgctgttgatgctacatatgcttatatgcgttttggagttggtggggagttctctaatgttcttacagagttaggtactgacctgataacaggtgcagagggagcattaagttatccgtataacttatatagtgcaactttgtcaccaacagaatcgaaattgtatagtttgtgggaaaatcattataaagctatcggagtgacaaatcttgtcttagatgcactgccggaagcaagtatatcggaggctgagaaagagagctatggtgctgaaatgaatttctttcgtgcatacttttatttcgatttagttcagcaatttggtaagatccctttggtcactgaagcaatacaagaacctcagacagactttaaacgttcttctgttgcagatgtttataagctaattgttagcgatttaagatatgcagcagaacatctcagggaatcagctacaggtacggatcaaagtaaggctactaaatatgccgctgctcatttattatctaaagtttatcttacacgtggtagtgcgataactgatcagcgtgggcaattgtcaactgatatggatagtgcttattactatgctagaagagtgatagacagttctaaatatactctgttaaataactattcagatttgtgggatgttaacaatatggggaatagtgaggttatcttttctattcagtttactcttgatccgatatataatggagatgggaataaatctcacttatattgggggtcatggtatgaagatcaacctggtatgatgcgtgatatagctaatggtcgtccttatcgttttcatcgtgctaccaataaaacgatgtttgagttgtttgaccgcaaaaatgattcccgtttttataagagttttaaatggacctattattgtaataaagcgacttcttccttggctataggagatactgcaatctattatagtttaaatgctcccaaaaatagaacatataagtataaatattttcaatggaataagaatgatccaagtaaaaataacagatattatcctattttgctgaaatacgaggatccattaagagaaacagcaaatgaacaaaaaggtgtacgtgaatgggtacgtatgcgtcttggcgagacttatttgattgctgcggaagcggcaggtcgtaagggggactataatttagctgctgatttgattaatattattcgtgaacgtgcttcctggaaagctggcgagaaaaaggtacctcaatattggctagaagaaggtggtgagatggaaaatatagaatctacttatgaaaatataaaagtgacggcagatgacctgaagatgaattttgtagattttatgttggatgaaagagggcgtgagcttttaggtgaatatacaagatgggaggatctggtgcgttgtgagaaattaattgagtatgtaaaaaaatggaatcctgatgcaatgaagaatattcaagagtatcacaaattgcgtccaattcctcaaaagcatattgaccgactgaatcctcgtggttctgatgaggaagaacagaatcctggatatttctaattataactaaatagttatgcaatgtaagaagttagttcattattgaactaacttcttattaaagatattttttatttttgaaaattaaaaaactaacatttaatgccgtgaacttgactaaatttttgaaaggaagtgcaattcttttattgttttcctcttttgttatttcctgtcatgataatgatgtgattgaaaaagaagaagataatcaggaccctgatacggaagaatctatcaatttggctttaggaaagaccgtcgaaaccagaattaatagcataactggctcaggctctaatactgaaaaagctaatttaatgactgatggtgatttaacaacatattgggaatctgcggactcatataaacattctattctaattgatttagggagcgtacaagaagtatcaaaaatagtagtgcattggattgatgaacgtggatgtaatgcgtatagcctcaattttggaaaagaaaaagataaaatagtaagtgttatatccaggaatgatgtagaagaaaaagcagttagtacatttgagggttttaaggaagaagctcgctacgtggaattggtcttacgtgggagattaggctatactggcgggtatagaatatccgagatcgaaatttacaatgaggataatatagagtataccaatacacctgaggaacaaaaagctcttgatacaattacagagcgattgattgctagttacttgagtgatataccagatgataagaatattgaaagcttctcaaagtcaatgcagacagatggttcatggacggatattgactataatgatcaaatatctgctgatggctggaaaccgaatggccatcttaacagattaaaagctatggcactaaactacaagcatcctgaaagcaaatttttcaatgatgctacattgttacaacaaatagaaaaggggttgttatgttttaagaaaaaggcaccttcctgttcggataattggtggtataatgatatcggtgcccctcaagcttatatgataccacttctgttgttgaagggacatatttcacatgaaaatatgcttgtggcagcagcatatttgaaagataagattgaaagttatataggaggtggtaagaatttatcgtggattgctgaaatcgcaatgcacaaagggtgtgctgaggataattattcaacagtacaacatgcttttaaggcgattgcttccacattgtcaattgtttcagaacaagggaaagaggggattaaaatagatggcagtttccatcaacatcatgcccagatttattcgggaggatatggaatgtcgctgactgatgacgtttcaaaatttatggaaatgtctgttgatactcagtttgcaaatgaatttactcttgaaaagaaagaaatatttcagaaactacttttagagggacatcttttacttagtttccgaaactctatcgattttggaactagagggcgaaatatatcacgtcctacgtctgagtatactacagttcctgtggatgtcttggaaagggcggtcgttggcgatcctgccaatgccgggatttatagagcatggataaatcatataaatagtggaaccgattttcctaaagcaaatgtgaacaaacatttctggaaatcagatatgatgacacaacatggtgagaatttctatatgtccgcaaaaataatatcaaagcgtacttatggaacagaatccttgaataatgaaaacataaaggggtataatcttcctttaggagctacgagtataatgacaacaggtaaggagtatgataatatatatccggtctgggattggactcgtattcctggtacaactgctattggtaatcaggataagacgtctttagaaggttatcagattggtaataacgagtttggtggaggcgttagtgatggtgtaaatggaattattgcttataagggtaaatacaatgaattgcaagctaataaagcatattttttctttgataatatgatgttctgtataggcagtgatatttcctatgttcagaatgataatgttttgacttctgtagaacagaatttattgaatggtgaggttatttataatgatgggcaagaaaagcaactgtcatcaaacagtaatatgcaattgaagcaattgaaatgggtatatcataataacacagggtatatttttagaggaacagataatgttactatacaaaatatgtctcaagcaggttcttggaaagatatcaatgctacaggagaatcggggcttatagataagagtgtttttagtgtctggataaatcacggacttaatccggagaatgccagttatcaatatattgttgtaccggataagtctataaatgcatttcgggatttagctgagcaaatagatctttatattgcacaaaatgatggttcggttcaggctatacgtgaaggcaataagtatggatttgttttttataaaagcgccagtacaaagatggacgatggtttagtgatatcatctgataagccttctattgtctttattgaaaaaaaaggtaacacttatactattgctgtgtcagatcctacatatacacaagcaaatgtaacgttaactctaaataaaaagatgatggagaagagcggggttactataacagaacaaggtagcaatattatttttactttgcctgtgggcgattacgtaggaagtagtgttgtagatgtttttaccgaaaaataataaaattatagatatatgaagaagttgcacttcattatagttgtactactttttatccgaacacctgttgtattggggctggatataaaaggtgaaaaagaagtacctgttactgttactgtactttccgattatcggttacataccatcataccttctgactttttgggatttagctatgaaatgtctcagttgaccgataattcctgttatctgcatcctgataatcttgtattgattcaaatgatgaaaaatttaggaaatggaatcttacggttaggaggaaatagtagtgataagatttcatggacaggtatgccacgcattgattatatgaggaaggattctttaactactacagatgtagatactttttcaaaatttgtagatttaacaggatggaaggttatctggggactgaatctgggagagaataatcctgagaaaaattcggatgaagctgtatatgtagcaaaacgattaaagaatgctctttatgctcttcagataggtaatgaacctgatttatattacaaacatctgcgtcctgtaaattatgcaataagcgattatgaaaaagaatggtttctacattatacgaagataaaagagaggttacctgacattactatagcagggccagcagttgctggggatatccgttggtttgagtctttcttgaacagttactcttccagaataagtttgatgaccggacatcattacaattcaccaggtaagaatgctacagtaaattggaaaactatattggaaccggataatcatttatcaggttatttgcaagtattgaattttttatgtcaaaaacacggaattacttatcgtatggcagaatgtaatacagtctctcaaggtggaaaaataggagtgagcaatgtttttgcttctgctttatgggcgttagactatatgtggagtgtggctttgagtaatggggtgggagtaaattttcatggtggtagtattagtaaatatgcacctattgtagtggatgagaaaggaattcctactcctcgtcctatctattatgcaatgcttgcttttaaatatggaagtgaaggtggtaatattgttccttctgtgatttcaccttctgttcctaacagcagtgcatatgcttgtgtcgatggcaaaacattgaaagttacacttttaaataaaagtgaagatgatattgccttcacagttcggctgaatgacacccctgcttcggttcagttgcttagacttacagcaccgtctccgatttcttcatctggaatacgttttgccgatgccgaagtagaagctgatggaagttttcaactaaatatgagagagaaatatcaaccacaaaatgaatatgttaaagtctccgttccggcaatgagcgcagcggtgatgattatagataaagaatgattatgaaaaggttactacttatatgtctggtgctatgcttttggggagaatacggctatgctgtagagaaacagaaagatatagagattttatataatagattgttggaagaatatttgtcggattcggtagacgtttctcaagcagaaaaggatttggctgttatgcaaactgatggtagctggaaagatattgattataagacagtgactttctatttcgatgcagagcgtcatctcaagagattaaagaacatggcattggcttatagtaaacccggaaataaattatttcatgagcaggaattgcgaaagaaaataattcttgggttagattatttccggatagctaatccagattctggaaattggtggtaccgggacatcggtgctccttcccaatatatgattcctcttcttttgctgaagaaagagttgaaaagagaagatgtgacgagactttcttcttatctggttgataagacagataatatggcccataaaggaaagaatagaacatgggtatctgcagtcttgatacataaaggctgtatagaagatgattatgagttaattgccaaaggattttattccattgcttctaccatatatgtagaagagaaagatgatgaaggaatgaaaagagataatagtattcatcagcaccgtcctcaactttattcgggtggatatggaatgtcactactgtccgacttggcagagtatattactttagctaataaaacatcttttatgaagttcttcacttcggataagattaagttggtatcagatgtttttctgaaagggacacagatgttcggatatagaatggcatatgattttggaacgattgggcgggggatatgtcgcccgaattgcttgagcaatatgtccacgcatacattagatttaatgaaagaagttgatcccgctcatgcggagaattatgaggcatggaagcggcatattggtggcgaagcctttccggtaccaggaaatacacatttttggaaatcaaacattatgacccatcatggttctgattattatatgtctgccaaagtcatatccgtacgaacaaatggtacggaaatgttgaacgggcagaatttgaaaggctattatctaccattaggagcaactaacataatgactaccggtcatgaatatgatgacgcctttgttgtctgggattggacacgggtaccgggaacaacggcggtcgctaatcaatcgactgccgaattacggtggtatctgttcggttcgaatcaatttggcggaggcgttagtaatgcccataatggagtaatggcgtatgaacatgcttatcaaggtgtggaagctcggaaagcttacttttttatgggagatgctatggtatgtatgggaagtggcattaaggcggcccgtacgcaggaagttcgtacttcggtaaatcaatgtttggcaaatggtgaggttacatatggcttatcaggacatacatatcggttaacggataacttgtccgacaaaaatattgattgggcttaccatgataatgtagggtatatttttccgcaaaatgagagtgtaacgttgagaaaagccaagcaaaccggtgcttggagagaacttgaagtaacagcaagtgataaaccagtaacaaaagagatttttagcttatgggtttcgcacggtactactccgcagcatgaggattactgttatattataatgcctgataaacctctttcttattttacagataagaagtttgagaatgaaattaagattatagttaactctgaacagatacaagcgatttccaatgagaataagagacagtatgctgccgtcttttatgagccgggtgaaatacggtttgcagatgatttagtggtggcagtcgataagaaagttataatatacattgagaagaaagacaaacaatatgaaatagctgtagccgatcctctatataaagagcagtctctccaattaagtatgaatggggaacaaataaatatagtattcccttctggtgattattccggtagttcagtaataaaacatattacagaaaaacataaataaggacgtttatgaataagttatccatttttttgcttctatttttatctgtcgcatattccgtacagagcagtaatacaaactatgcaagaacaaccgatagaatttggttggattcgaaagaagtgcatcagggagaatatatctggaagatgatgaaagtaggtgatgtggaagcaacggctgaggaggtttcatcacttggttataatacgagcgactggttaccggccattgttccgggaaccgtgctcaattctcttgtgtacaataagaagtatcccgaaccctattacgggttgaacaataaaatagaatccaataagataccggatatttcaaaagtaggtcgtgaattttatacttattggttccgcacagaatttgaagtccctgcttctttcgcaggaaaaaatatatggttgcagcctgacggcatcaattatcgggcagaaatatgggtaaatggtcatttgctgagcacaatcaatggaatgtttgtcaatgattatattaatattaccgactttgtgaaagtaggtaataagaatgttcttgctgttagagtctatccggtagatatgccgggaactactatgtcaaaaccctggggagctgtaggcgaattccataatgggggtaatggaaatattggtttaaataccaccatgcttatgagcgttggatgggattttacctttatggatggtattcgtgaccgtaatactggcatttggaaaagtatgtctatgtataccacaggaacattggcgttgcgtcatccgtttgtgaagtccaaactacagaaaccaggttatgatgtagcacgtgaaactatatctgttgaagttgttaatccgttaaattcgacggatacgatcagtggagtgattaaaggagagattacaggagaaaatattgtggtggaaaagcctttccgcatattgcgtggtgaggaaaaaatggtgactttcactccggaagagtttcctcaactcgctatccgtaacccacgtttatggtggccggtcaataaaggtcctcagaacttgtatgagttgaaactgacagtaagcgtaaaaggcgctgtttgtgactctgttaaaacccggtttggtattcgtgagattacctctgacacaaatacccctgataaatcacgtgtattttacgtgaacggtaaacgtatttttattcgtggcacaaactggattcctgagggaatgttgcgtacttcggatgaacgtacctatgctgagttgagatatacccgtcaagcaggtatcaacctgattcgtttctggggtggtggcatagctgaatcagactatttctaccagctttgtgatgaactgggattgttgatctggcaagaattctggatgacgggagatacacgccatccacaggataagagtgtgtatctaaataacgtggcatctactgtgaaacgtatccgcaatcatccggctctggcttattatgtagcgtcgaatgagagttccgaagttagcggtatgcctgaactgctgaaacaacttgatggaacacgtggctatcagatgcaatcggaatgtgcaggtgtgcatgatggaagtccatataaacaggtgaatccgatgcaacattatgaaaacactgcttctgcgagaggtagccgtgtggatggttttaatcccgaatatggtgctcctacacttcctacggtagaaattctccgggaaatgatggacgaaaaagatttgtggcctattaataaagaggtttgggattatctggatgggaatggattccatctgatgtctaccatgtatgctgacttggttaataattatgggcaatcttcttctattgacgagtttgcacaaaaagggcagtttgtaggtgccatgaattcaaaaagcatttgggaagtatggaattataataaacttgattatggtgaccgtttctgttccggtttactattctggtatcataattgcccggttcgtcaggtctgtgcccgtatgtgggattggtcgttggaaccaacggcttcactctaccatacagctaatgctttggaacctttgcatgcacaatttgattatctgaagaatacggtatcagtagtgaatgatttctatcaggaattcaaaggttatacagtagtggctcaggtttatgatatcaacagtaaaaaggtattcgaagggtccgcgaaggttgacctttcttcggatggtgtggcaaatgatgtattggccattcgctttcctgaagatatttcacaggtacattttattaagttgagattgaaagatgagaaaggcaaggaagtttcatccaatttctactggcgttccaatgataagtatgaaggtaaggaaacactgaccgggcctacttcttcaggctttgaaacattgtctcaattgaaaaaagccaaattgaagactacttataagataagaaagggcgaaggcaagtatttcgtggatgttacagtgaaaaatgtgtccggttctatcgcctttttcaaccagttgcaattcctcaatcaggatttgaaacctattcgcccttctttttatacagataatttcttttctttgatgccgggtgaaagtaaatccgtggttatcgaaacgaatgctgaaaagataactgaaacaccggtattagtggtgaaaggatggaatgtagaccgtaagcaaataaataaataaagaaatgaagacgaaagtaaagaaaagaacctggatagccttattgaatttgctatttctttttacagcagtcaatgcgcagcctgtccgtcagtacctgcatgaaggatggagcttccggcaggcgaggggtactaactggtatgaagccactgttccgggaacagttcatacagacctgatggataacaaactgatagatgatcctttttacaggctcaatgagcgcggtgtgcagtgggtggataaagaagactggatttatcggacgacgtttgatgtaacccctgagttgctggcaaagaagaatattgtgctacattttgagggactggatacgtatgctgatgtaacattgaacggaaagaagattctttctgctgataatatgttttgtgaatggcaggcggatgtccgttctctcttaaaagagcatggcaatgaattgcaggtttatttgcattctcccgttaagatagctatgccgaaatgggaagctgttcctttccagtatcgcagttcgaatgaccagtctgagaatggaggtttgctcaaccgcaagatcggagtgtttgttcgtaaagcgggttatcattttggttgggactggggacctcgtttggttacttcgggtatctggaggaccgttagtctggaagcatgggatgaggctcgtataaatgatgttttttataaccagcagtcggtgacagcccaacgggccatagtgaatgtcacggtggaagtattggcagataaggagacagaagcaaaggtagctgtgattaatcgtacggataagcgtaccgagtgccggaaattgattcgtttgaataaaggtttgaataaaattccggtatcttttaccatgaagaagccacggttatggtggactaatggtttgggcgaaccttttttatacgactttgtagcaacactggaactgaatggtaagcaagtagatgtaacagagaaaaaactgggtatccgttcattgaaagtggtaacggctcctgacgaatatggtgaaagcttttattttgaactaaatggaaaacccttgtttgccaaaggtgcgaattatattccttgtgataactttctgactcgtgttaccgactccatttatgaaaaaacgatccgggatgcagtcagtgcaaatatgaatatgctacgagtgtggggtggtggagtttatgagaaagatatcttttatgatttgtgtgataaatacggcattttaatctggcaggactttatgtttgcgtgcagcgtatttcctgctgaaggcgaattgctggaaaatattcgcagggaagccattgataatgtacgacgcttgcgtaaccatagttgtatagccctttggtgtgggaataatgaatgtttggatgcttggttcaactggaattggaaaaagacatatgacaaacagaatcctgcttattcggatattatatggaaacagttcaagaatcagtattttgtgacgttgccggctgtggtagaagaattccatccgggtgcttgttaccgtaaatcatctccttattctgatgacaaagggacgcgcaatcatacggtgggtgatatgcactattgggcagtttggcaagggctgaaacccctttccgaatttaatcatgagcgaagccgttttttcagtgagtatggttttcagtcattcccggaattcgagtcgatcaaacggtatgcacctttatcagaggattggaatctgacttcggaggtaatgatgtcgcatcagcgagggggaacagcggctaataagcgtatcaatgattttcttttgtcggaatatcgtcagccgaaagatttccgttcgtttacctatatgagccagcttttgcaggctgatgctatgaaaatggctatggaggcacatcggagggatatgccctattgtatgggatcgttggtatggcagcataatgactgctggccggtggcatcctggtctagtcgagactattacggacgttggaaggcgcagcattattttacggtaaagtctttcgctgatttactggtatcgccaatagaaaaggaaaacacgttgcagatatatatggtatcagacaggctaaagagtacttctggtaaattaacagtctgtgtgctcagattggatggtaacggagtggtgaaagaattcaagaaacagataactgttccggctaatacaagtacagttatatggaaggaagctgtggatgggttattgaatggagagaaaaaagaagacgtcgtcgtacacgttctttatgaggataaaacaggaaaaaagtatactaataattattttttggcgaagcaaaaagatatgcgttatgcggcagctcggattaataaagactttgtaccgactgaaggagggtatgaggtaactctgtcttgtgatgtgtttgcaagaggcgttttcttgtcactccaaggggatattgacaatttcatatccgacaattatatggatattttgcctggtgaaacggttacggttaaagtgactactgaactaccttcgttgcagtttgccgaaaggctacaggtcgtttctttctcggatgcagtgaaacaatagaatataaatttaagatataaccatgaaaaagagtacattattgtttgttactattctaattagtttttttcccttcggtgacttattcgccaagggtaaggtaaaagttgataaagcgttagagcatgctgctcgtcagtatctctatatgaggagcgagttgcaaggaagtaaccagtttcctaaaacgtatgacaaacatatgcaacgcctgaaaaccagcaactcggaatggtggtgcagcggcttttatcccggaactttgttctatttgtacgaggatacaggagacaaggagctatatgctgaaggagtgcgtatgttgaagctgctggaaccggaacaatacaacgtgaatacgcatgatgtcggttttatgatgtattgcagttatggcaatgcaaaccgcattgctccgaaacctgagtataaagatattatggtgaacagcgcccgttcgttgatttcccgtttcagcccggtggtaggctgcattaaatcccataatcgcaaaccggatgattatgttgttatcattgataatatgatgaatctggaattgcttttctgggctactcaggccacaggagacagcacattctatgatattgctgtgaaacatgccgatacaactttgaagaatcatttccgggcagacaatagtctttatcatggactgaattataacccggaaaccggtgaaataaagcactaccaaggtggacagggcttttccgaaaagtcagcttgggctcgtggacaagcctggggattatatggctatacactgatgtaccgttttacgaaagagcggaaataccttgagcaagccataaagatagcagaatttacgctgaatcatcctaatatgccgaaagacctgattccttactgggactataatgctcccggtataccggatgctttgcgtgatgcttctgcagcagctatcaactgttcgggattattggaactatttcagtatgtatccgaagaacgggctaagaaatattataaggcagccgagaaaatgctccagacattatcctcaccggcatatacggcagaggaaggaactaacggaggatttattctgaaacattcggtaggtaatattccttccggtacagaagtagatatgcctttgacctatgctgattattactatgtagaggcgttgtgccgatacaaatccttaaatgataaaccctaaaattaatgatgccatggtgaatagatgtaatatcgttttgtttgcaatatctttgctattttcctcttcccttatagccggaacaattgatgtgactaagcgtggagctaaaggagatggggtaacggataatacaatcattatacagaaagccgtagatgaatgttcgaagaaaggaggcggaaccgttttgataccatccggatcttatttgatacgtcccattgaactgaaatcaaatgtgaaccttcatctggattttggcactttattgttgggaagtacacgtttgtcggattatgataatgcctttcccttcaaggatggtagtatgaatcagtcttccggacttttgtttgcacgtggacaaaagaatatttcgattaccggattcggaacgattgacggacaaggtggaaataaaacttttcaatttggcaatgatgcggacggcggaccgaaacgtcctaagataatttattttgtagagtgcaagggcattgttgtgaccgatgtcactctccgtaattctgcctattgggtgcagcattatgaaaaatgtgaagatgtcactatccgtggtttaaaggtattcagccattgtaattataataatgacgggctcgatattgatgccaagaatgcgactatatctgattgctacattgatgtggaagatgacgccatttgtttcaagagtgaccatccggaattttgcgagaacataacggttacgaattgtgtcacagcaagtaattgtaatgcaatcaaattcggtacagcttctcatggaggataccggaatattgcggtttccaattgtgttgttcgccgggcagcggaagataatattcgtcattggagtaaacagcttgaacatatttcggccgatgttaccgttatttcgggtgttgccatagaaatggttgatggaggcattattgatggcatcaccgtttccaatatttctatgcgcgatgtccagactcccatattcatccgtttgggagacagacaccgcacttaccggaaagagggtggtgtattgaagaatataaatatcaacaacattgtagcaaccgcagaaagcctgatagcctgttcaataactggtgtggagacaagctatgtagaaaatgtttcgatcaataacgtgcaaatcagctatccggggggcggaacctcggacatggttagtaaacctgttccggaaatgactaaaagctatcctgagaatcgaatgtttggtaatacattaccggccgccggtttctatgtacgtcatgccagaaatgtgagatttaataatgtacgttttgatgcgatgaagcctgatgtacgtccgttattctttttggatgatgttgtcggggcagaactgaatcaatgtaaaggtgccgctcctgctgatgcgaaatttattcgtacagtgcatagctcagggatagtagctgatggtaagtacctggataaataggagtatgtttatgaaatgcttgaaactaatattctgtttgctttatttttgttgctctttggctgaggctaaagaggtgcaagtagatgcgcaaaaagaagtggacgaaatgaccggacgactggtcgcttcctatttggaagcgaaagtagatgaggacataatagcgggttatgcgagtgcgttacgttcggatggaagttttccggacctggattatgtaactgtgcatgaaggttcgtcttatccggccggctctcatttgaaacgcttgaaattaatggctattgcatatcggaaacctggaaataagtattataattcaggaagactgttgaaacaaatagttgcaggtatcgattattggtatagagtacgtcctaaatccggaaactggtggttcggtgatattggtgctccccaagactacatggttccgttgattctgctgaaaggcaaaattagtgataagaagttattgcattattcttcttatctacaagatttgactgggaataaaggtcataaaggcaaaaaccgtacatgggtatctgccgttaccattcataaaggatgtattgaaaataatattgagctgatacgaatcggaatcaagtccatagcttctactattaagattgtttcggaacaaggtgacgaaggtattaaggtggatggtagtttccatcagcatcgtccgcaattatattccggcgggtatggtttatcgtatgtagatgatattgcatattatttacaattggtgaaaggaactgcctttgagccttattttacacaagagaaaaaagatatatttatcaatcttctgatgggtggtcatcggttgttgggctatcgggaaacgtttgattttggtgcaatcggtcgtaatatatcacgtcccgaaggacttagcaatatttctcctgtcacgctggaatacatggagcagaatgattctgatcgtgctgctgattactcggcttggaagaaacatctttccggtgctccttttcctgctcccggtaataagtatttctggaaatcggacattatagttcagcatggtaccggctattatctctctgctaaggtgatttctacacggactaatggaaccgaaatgcttaataatgagaacctcaaaggttataacctgccgcttggtgctacgaatatccttacttccgggaaagaatatgaaggtatcttccctgtatggaactggaataaaataccggggactacggctgttcaacatcaggactctactcgtcttgaaggatatctgttcggaaaaaatcggtttggaggtggggtaagtaacggcaagaatggagtcattgcttatgagcattgctataagggagtaaaggccaggaagtcttacttttttatgaatgatgtacttttgtgcttagggacagatattgcatcagatgctcccgaggaagtggttacaactgttaatcagtgcctttttacaggcgaaatggtagttggcaaagaggaaggaactacgtctgtttatagagaaaatgtatctgtaaagaatccggcttgggtatatcatgataaagttggttatttatttcctttaggaggagacgtaattgttagcaatccgaaacaaaccggagcttggaaagatattaatatcagtgggagtgggaaaaagatttctgctgacatctttaatctctggattagtcatggtgtaaaggctaaggaagggaaatatgcatatatggttgttcctgacaaatctttagaggagttccggacatttacggctacccagaattataagattattcaaaatagttctgtggtgcaggctgttaagttgaatcagcagtatgctattgttttttatcatccgggaacaattgatttaggggagggacttacactagctactgataaacaagtgattgtctatcttgagcagaagggaacaggttacgatatctgggttgcagatccgctttatagtcagagggaggtttgtctggctcttaatggtagagaagtgcagatcgcttttccggagggtgaactgactggcagtacggctttcacgaatattgccactctccaaccttttgatttgcaatgtgaatatcttagtaatcctttaggtgttgacatactgcaacctcgtttgagttggaaaatgggagctactacctcggcacgcgggcggaagcagactgcttatcagattcttgtagcaagctcccgggatttacttgatgcagaccgtggagatctttgggatagcggtcgtgttaactctgctgagtcggtgaatattgtttatggaggagtacctttgtctgccggacaaagatgtttctggaaagtccgtttctccgatgagcataattgttggtcagcatggagtaatccggcaaattggcgtatggggctatttgctgctgattgggcggcacaatggataggcagtgcagaaatggaatctcagagtgtgggaggtaagaaggttaataatgtaatggcagatccctggttccgtaaaacatttaatatgtcggatattccacaggatgctgttatttatgtagcttccataggttatcatgaactgtatgtcaatgggcggaaagtgggggatgctgtcctttcaccttcggttacggatcataaatcacgtgcccgttacatgacatatgatatcaagggctacctgaaaacaggtactaatgttatagctttgtggctgggtacttcctgggctgttttcccggcctatcagcagaagaatagaccggctattccgatggcattggctcaagctgagatcgcattatcttccggaaagaaattacgaattgtttcggataatacctggaagacccatgcaagtcccaataccttgttaggctactgggaggcacatcactttgagggagaatgttatgatgctgctttggaaaaagatgggtggaatactccggattttgatgattccggttgggctatggcaaaggtttattctaccgacgttatagtatcatctgaccgtacagaacctaatcggttacttggtgaaattaaaccactttctgttcaggaagttagtcccggagtctatagggttgatatgggaatcaactatgccggctggtttgagatgcagctccaaggccaacccggtgattcaattgtattccaattttctgaaagggaaaaggatgcttgtagttatggtatacatagcatttataaagttggctccaaacggaaaggagtcttttgtaaccgttttaattatatgaccggacgctgggtacaaattaccggtcttcggtataaaccggaattagaccagatacgtggttggatgattcgtccggattatcgccggagcggtggatttgaatgtgatatccctctgttgaatgatatttatcgtactactttgtggacgtttgaaaatctcagcctgggtaactatgtggtcgattgtcctcatcgtgaacgttgtggatacgggggagatgcattggccactacgcgcacagctttgggaaactatcaattgggggctttctataacaaatggatggaagattggcgtgatgtgcaagatcccgaagggaatgttccctataccgctcctacccgcattggcgggggtggaccatcctggagtggtttctgcattaccttgccttgggagctttatcgtcagtatggagatgtacgtattctttcggagagttttcccactattcagtgctggctttcttttgtagaaacgaagtcgcaggatgacatgctggtacgttggggaggtaaatggagtttcctgggtgactggctctggccggatgcatggtcggaaaggtcggctatggagaaacagggaaaagcacttggagatactcgggaaactttattcttcaataactgtcactggatttacagtcttgaaactgctgcacagatagccgatgtgttgggtaatgaaaaggcagcttccacctatcggaaccgggcgtcaaaagtacgtaaggctgtccatgctactttcttcaattcgaaagataatagctacgtgaatggctatccttcttatcaggctattgcattgatggtcgatttacccccgaagcatctgaaagcaaaagtctggaaacgtcttgaacaagaaatacaggtaaagcgcaaaggacatttctggggaggcattactgccggttcattcctgttgcatactttattagataatcatcgtaatgatttgatttttgagatggctaccaaagaagattttcccggctggggagatatgctgaagcatggcaacggtacgttctttgaagattggcaatgtcgtggctcgggtctgcatagttcctatttgtatataggtagctggtttatagaggctttaggaggtatccgccgtccggaggccggctataaggaatttaccattgaaccttggattgcaaaaggcggtcccaaacaagtacgttcgcactacaactccctgtgcgggaaaatagtctctgactggacggtggaatcaggtgtgttgacaatggaaatcaccatacctgctaatactactgctgtcctgaaattatccggcatccatcctgacactttaaaggagggagaaactgcgtggaaagaggcggaaggagtcagtctgtattcacaaaaaaggaatgctctatcactggcattgcagtcaggcacttatagattctcggtggtgatggatgaaggcaggtaattgtacctgcacttcatccttcaatttctgcacttcgtcggaaatacatcctttcataaccggatatggatgataatctgtaaatttacagcggattcctataaatagagtgccggatgataaaatacctgttagtagaagacgaacgtttcgcttacgaagagatgaagcggatgatggagaagttgcgccccgattatcaattggaggcatggacggccactgtggagcagaccgtacaatttctgaaacatcatccggtagatctgatgttgctggatatccggttgacggatggaaacagtttcgacatatttgagcagatacaggtcacgactcctgttatttttactaccgcctatgatgaacatgccatacaggcattcaaggtaaatagtgtggactatctgctgaagcctgtggaggaagatgatctactggcggcattaagtaaatttgaacagttcagggttgtgcaatctcccgttaccgattacaggaaactggaagaagcattgatgagtaattgtaaaaagaaccgtttccttatccagaaaggtgatgcgtatcattatgtggagacttcagatatcgctttcttctacagtgaagaaaaagtagtctttctgcacaccttttcagataaacgctatattgtggactatactttggaacagatagagcaactgctggatgaaaggactttcttccgtgtttcccgcaattgcattgctaatatcaactctatccgtaagatatccaagtacttcaacagtcggttgaagttgagcttccagcctgaatgcccacacgaggttttaatcagtcgtgtgcgggttcctgatttcctgaagtgggtggatggtgtgctttaaaatacatttggggatgaagaataaatggtatatcctgctttttatagtgctcattgcaatttctttgtttgcattccagtatgtggcggagcttctttctgacgctccccggagcttaagtttggaaacacagtatctgctcaatttacctgcctgcatttttgtggggattgttgactttctcatcattgttattgtccataagaggctggacaacattaacaatacaatgagaatctttatcgatttattgttggcatccgtatgggtgagttgcttcggcatagcggcaaattatttcctgtccattattctggaggaaccttggccggaagattatgctctgctgaaaatgtctctgccggtagtgctttggaatagcatgattgttcttctgattgagatattcttttatcagcaaagccaaatggaagcagagaagaaactggctattatagagaaagagaagattcagtatcagtatgaaaccttgaaagcccagataaacccgcatttcctgttcaatagtctgaatgtgctatcttcactggcctatagtgatgcggaaaagaccaatctgtttgctaaaaagctgtcaggtgtctaccgttatctgttgttgacaaacaatcgtccgatggttactttgaaggaagaactggcttttctggaaagttatgtatttctggagaagattcgctttgaagatacattgttcatcgagatagacgaatatgatttgtatggaaccagattgatcattcccgtcagcttgcaactgctggtagaaaatgcgattaagcataatatagctactttaaagaatccgcttattattcggataggctttaccgatgaggggatcatggtttccaataatctgcaattgcggagttcagtagatagaggtggtgtaggattagggaacctggaaaaacaatacgccttgtatgataaagcaattgatatcgtggaaagtactacagaatttgtagtgagagtacctttcctcgaataatcttcttttttccttttgttccatctttgggataatgaaattcaacaggtctttcgtgcagttcgtcggaaaagacttataccggacaagctaatctcttttctttgcaataaaataatctaatttattagcaatgagacgattctcttatcttttatttctgttgctcttggtggcagcaatcgatggttttgcacaaggagttattaaaacggagtatatgcctgcctcttctttcagagatgaagcggggaataaattgggttcgggtgatttattgaaattcaccggagcatacacgctacccttttcgttgaagcagaatgcatcgggacagcctatcatgtggtcggcatcggtaagaggaacttacgcgatacttaataatcgacatatggccttggatatacatccggatgaggtgttaagtggcagtctcaatctgacgcatgtacggcccttgtcgaaaaagtggtacatgatagccagtttgggagcaggtatttattcggcaccggatgcaattacctggcagagtgtattggtgaatgggggagtgatttttgtgtataaatgtaggaaaaatctggatataggtgttggggctggattgacgaattcatttggagtacctattgccatgccgatgttctttcttaactggcaactttccggtaattatgaggttaatgtgaatctctcttccggtgttgaagtgtccggggcggtacgtttgggagatcggtttaagctgaggctggtggcaatggaaatggatggaatatcttccgtgatggatgtagagggaaagtcgatgatatatgcttcagttatgatgcgatcctatctctgtccggaatacaggataggtaagaagtcgtgcctgtatttggggataggaggcaattggctcaggtctggcgatctgactaaacgtacgcttaaggggtttgtagacaatatgttcagtgataaagatgatccgtatttcaatccgacggtttacttttctgccggagtgaaatgtgagttttaaacggaactcgttcaataaaaagttggagcaagttactctcactaccctcacttttagtgtgaatcgttgatagttagggtattaaatgtggtggtagtaaaaaatccggtgtgagggtaagtgggttactctcactttctcagtcaacccatatccggacgaggcatttatttatctcgtatcaggtgttattttgttgaaaacaagggatatatctatttagccttaggaatcgttgggtgttgaccttggttaaccggcctatcaaccttagttaacgagtcgattaaccttggtcgacaggcttgttaaccaaggtcaacgcctaataatgcttactgtggaggtacaaaacggaggatgagtatccctcatttggctattctgtcgacaaaaccttccctttcgtagattttattttcagctcttctttctctcccttacatttgcatcgtaataaaaaactgacgcaaaatgaaaagtaccggaagattatggttattagctgtatgtctgttgtgtgggctggtttgtacacaagcaaaggagcaggagaagaaacaattgccccgtgaagttccttcaccggagaaagctgcccggaaaatgacggaccggatgaaagaagaactgcaactgacagacaagcagtacgataaactatataaactgaacctgaaagaacaacaagaacattttgcgactatgactgaaagaggaaatagtcagcgtcctttgatgggaagtcgtcccggaaggggcggtgctcgtccaccgatggatggtggaatgggccccggtatgggaggcggtcgtccgccaatgggagctccaggcgaacgtcctgtaatggaaaaggacaatgtggagaagatgcagaaagctgctgctaaaaaggaaaagaaaatcaagaaaatcctgacggcggaacaatatgcaaagtggcaggaaatgtgccagccacaagaaccacctcatccacaggatcatcctcacaaaccaaatctgtagagactctctctaaatagcgttttttcatgtattattgactgtaccgttccacccccgtgaggggagggaacggttttcttgtaagcccagtatgggcgtacgctctagggtgcaagtcccgagcgagtcctgatagtgggaatcgttagccaatagcaagggtgttcatagcgatgtggaatctgaaggaagctggcggcaaattctcggccttacgaacagaaactggatacaaggccgtgtatggaggacaagtctgcatgacaaggcaaagtcctataattatctgaatccatacatggtaaatgcagagggcacatgagatgaaagcgtacgttcttatctggggaggtctcacggacacgtgtcactacttagtgtcatgtggttgaaacaagatttgtcgtgagaagtcagccgagaccatagtagcgatatgagagtgtcgtcaagggtcgaaccattaatctgtaagtcaaatgaagactaccttatgaaagcaagaatgcagaacgaatcaatgagattagaccggccggatagtagggtggaacccaaggttatggccggtttgcagaccttcatggggataagcgaacagggacttacatcctttacttgtccgaaggagggattgctggagtttattctctctcccgccaatatgaatgctgcttacaagaaagtgaagagcaacaagagtagcggtggaatagacggaatgagtactgaagccctgcttgcttacctgaagaagcatggttcggagtttatagcctccctccttgaaggcacatacaaacctaatcccgttcgcagagtggaaatccccaaggcaaacgggaagaaacgtgggcttggcatccctacgatagttgaccgtactgtacagcaagccatcagtcaggtgtttgaggtgctttatgaacctcagttcagcgagatgagctacggcttccgtcctcaccgtggtagtcatagggcattgttgaagtgcggcgagtacatcgagcagggatacttgtttacagttgatatggatttggagaagttctttgacacggtcaaccattccaaattgatagaggtgttgtctcgtactatcaaggacagtcgcttagtatctctgatacatcgctatctgaacgcaggtgtcatcaattgcggcaaataccagcttactcaactagggctatctcagggtggccctttgagtccaatattaagcaacattatgctcaatgaattggataaggagctggaacgtcgaggtcacaagtttgttcgctatgcggatgatttgttgatattttgcaagagccgtaaggctgctcatcgtacttacgatcacattgtcccttttatagaagggaagttgttcctgaaagtgaatcgagaaaagaccaaggtagcctatattcgtgacatcaagtttctttcctacgcatttggtcgtaggaatggtaagtgtcagtatctgttgcatcccgaaagtatcaagaagatgaaacataagatccgtgagttgaccagccgtagcaacggctggggttacgagtatcgcaaagagcgtcttcaatggtacatctgtggctggtcgaaccatttttcagtggcaggctacaagaaccgtcttgaagaatgggatagctggcttcgtcatagaatccgcatgtgtatatggaaatcatggaaacgggttaggacaaggtatcacaacttaaagaagctcgtacccgatgagaaccgtgtgcgtatagcagctttctgccgcaagtcctattggcggatgtcctcgcaccccacggtacatgaagctatgtcggatgaacgcttgttgcgtgcaggttaccccacgtttgctggttgttatgtggacttcaataaggcaaaagggtattggtgataatggaaccgccgtatgccgaacggcacgtacggtggtgtgagaggacgcatgaggaaataatcctcatgctcctactcgatttatttaattttagaaatttagattactcatagattgatttctttacttcctttgtccggttcacattatggagcacttgttttatctgcttaaatgcaacctcttcttgtggattgaacttatcactttccatatatttcaggaggctatagcgtaattgacgggctacaggtcgggtattgagattctttgccaggtctgagctacatactaatagctttccgtctcctgcttttacctcgaatagtaaacctaagtttctgttcttatagaagttatctaccattctgacaatcggttgcatattgttctttaaactgtcgagttccattgttgtagcattcttgcaaatatcccaccattgccagttactgtgcatttcagttggaaagtcgactaatgccggatgagcgggatcacagaggattcccattgttcccggttggttagggaagtgcacaggactccagaatacttgtacgaatttgccttccagcccattaatttcctctttttccgggttcagcaatacctttttcccttgacttaatgctttctctgcatcggcaaagctacgggtgtaaaagatttccttaccaacttccggtacttcctgaggatatacccaaacattccaggagttttgatactgggttcctgtaaaacggatggataaagttaattggtcggcaacagatatggattccagaggaacagagatgtttcccagattaaatgcattccccacaggtatttcttgtttatccagattgccttgtgcaatgaccgttccttttgaatcacttaatctccattccggttgaatatcactcaggactttatcgctgaagtttgcagcttcaaactgagctttaaaggtttcattatttacataggtagctttctcaaagcgtgctaatggtactaccggagaacagaaattccggaattcttcaggagtgattaaacctttgctctcccagaatgcatcgataattccaacgagtgcagtgccctgtccggggaagtcatgcaggtccaatagttggaaaccactgaatccgggagtctttagtgctcgttctatttcctctttatataaaatagttgccagtttgccacttgccatcaggttgccttctgccagatggagccgtcctttctttttaaggtctgccgctacggctttgaagtttaatggcatcagattacctgtgtatttatcaatttcttttagattggggaatacactgtattgtccgatttcgtgtgtaataagtgggacagacaaaccctctatagcactggagaagtctttattgaaacttgcaggctgatcgtcgaaaattccttgtccgcgtacccagccgtttttagtccactgtgtaacccagaagtcgtcattaggttcgggccagctaccatgtcctggttcaaaggtaaatgtagtagtcatatacaaatgacggctatcctgctgcttaatggtggtgagtaatttatccatgacactaaaatccccttgcagttcattacccagactccagaaacagaatgatgggtgattaccatattctttcatgatgtgagcagcttcagtatacagaaaatcaacagtgcctttatcttcacctacattgagtgtccatagaggtaattcgacctgaagatagaatcccattctatcagctacgttgaaagcagcttccgggggacaccaggagtggaagcgcaggtggttcatgccataatcacgggctgcactgaatacttttttccaaccggcttcgtccatcggcggatatccctttagcggaaaaatgcaacactccagtgttcccctaaggaagagtcttctgttattaatctgtaggagagcattttggttcgtcagttttctcataccgaatatttcacatttcgaatcagtcatgccttccgtttcaagagttgcggttgcttcgtagatattaggggtgaattcatcccacaacattgggttgttaatgggataagtgaatgttatttcagtgttgttaacctgtacctctttatctgccagcttatttcctttagggtctttgacagcgaacagaagtttaccggatactggggatgaaccgttacttccgatttttacactgacattgaccgtctggttatcaatatcgggtgttaagcgcaattcctcaatctgtaccttatcttttgctgtcaatgctatttttcctaagataccattccacatagtctgggtatcgttcgtataagcatgtgcaaggtttttgactgatatatcatactgtctccggttatcgatgcgtataactatcttgttattctctcctggaacaagatacttactcaagttgaagtagtgaggagtggtaagactttcattgaatccttctactttagtaccattgatccatacttgcgaattccatatcacgcgttcaagagtaaggaagacatctttttcgttccattctgccggaatgaagcattctttcttataccagacggggccgagatagtcgaatttacgtttcaaatttaagaatatctccttgtccatggtaggttcgagagtacatggagttccatagccggcatcacaaagtgttccggggagggtgatcttatctggaaacgattccatataccattttcctgaaatgcctttatccatactgtccaatgctacttcccattctccggagagatcaatctcgcgtactacctgtttacacgaagtcatcaatagggctatgatgccccaggcgattaaaaatttacttattctcataatatcaaattaaaatttccattctgttttaattctcagtttcttatcttttactcttacaatcagaggatagcaaaaaggtgaatcatattttgatagaacacttccgtttcccggtggaatgccaggagcttcccccgtaataacttcaaactcttgcccctcggatacttcaatcttcatatatgcttttcctattttgcaactaaggggcgatgattgctttcgcactattgcgttttttatatagttgtagcttggcgagtcattgaggatgataacttctccggtttggctgaataccggtttctctgtaagtatcaatacataatcatagaggtgttgctcatcggaacgggcagtaagtatatctgtaagtttattcttctttaaaattaactttctttccattgtgactccagaatatgcgtccggagcttctgccgaaacttctcctccgtccttatatgctttgaatgccagcaatttgccggttgactctttttgatctttagcatctacggttagtgtgctgtgtgataaagtttttcggtaccatttagtaaatgcaggtaccccataggcacatgtccccatatccgatacaatctccttttcaccgtcatgaatggaaatggacagcttatccggatggccgtgccctccaccatgtggaccgtatttcatgactaccgtctttgtgcctgatctgagtacagcatagcccgtttccttaaaatgaacggatggccatgtttccattgatgttacttgaggaatttctatattattctgtaatgcttcaccgaagttcctgtctgtgtatcggtaacactgttgaagtacactcaggaaaaatggatcattgttgtagcgttggcaggctatttcatataggctgacctgagcaattaaagactctccataccatccgtcattgtgggctggaaaatatagatctgcatacactccggatgcaggagcaacgagcattttatatagtttcctgtcatatagattgatattacggcaacgtacggcatcggctgacagaagcatagctcgtaaaggataatagtgatatgtaggagaaccttcgccccaccaaccgtcattcataacgtatcgctccatttgggcatggtatccacattccggatcattgattgctacgttaatgatgctgtcattttgtaatgctactcctaatgctatcagaccgctattgtgccatacttgccaattggcagttcctcttcttttcaacaaaagctcagaacaaggtatgagataacctttttctatttctcttatttcgttagttgtcattatggatttggctaccatataggctcggcagacatcactggcccatgcagattcatcaaggctttgaccaaacattttgcctccccagggacctactttcctggctgtgtcgtggtccagataagtaatatatttcgatgcgtaatccaataacatatttcggatgtattcagcatagaccttattgccagtggcaaggtataaatacatacagttgcgcaaatatgtataattatgagtatgcgccacatttacccatgcccagtcgtaacgcttattccctgtccaataatgcttgcattgtgaacagtaatgtgcttccggcttattccagtcgaatgaaaaacgtactttgtgttcggggcaaaaataatcgtgtatatgtcctccttccaatagaggcacatgtaattggaacttccgccgcgaatctacagtgtcttttaacgttttgataatcttttgtccccattcggtctttgcagctgaacgcatattgtttatttcactttcagtaaagaagtaatatccattttgcgctgaaacaataaaagggatgaaaagtagtaatattaaaatcttgtttctcatttttagtgttttaagtatttaatatattcggttgcagccattaggaaagcacctgtgccataaacttccgtatcatttatatctactttcttagggtcggcaccaatgggttgtacataacctactttaccatcttcgtgtacaatggaagtaagtgcatgccatgctttctccgctatggatagatatttctccttttcaagatatccccggttgattccccaaaataggctgtatgtgaagaaggctgacgaactggtttccggcatcggataagaggctatgtctagtaaagaagaatgccaaaagccttgtttatcttgtaatgtagatatttttcccatcatttgacgaaaaagggtaatgtaaaagttgcgggaaggtgcattagctggcatattgtcgatgatgaaggttagtgcccctgttacccaaccgtttcctcgtccccagaatactttctccccattttgctcacgcatattgatgtatctggtatctctgaaaaataaactatcggcaactgagtagagactgtcataagtgattcgaaactctttatccataaattcgaaatactttggttctcctgttattttcccaatacgggcaaaagaagttggtgccataaacagggcatcgcaccaacaccagcgggaatgtgagccttcactgtaatagctcagactgttgtgcttagggttggcaataagtgtatccaaggtctcaacggagttttggatcatgtatggttccttgtatttactgaataatatggcataaggttggattatacagatatcatcagcaaaatatatactaggtccagtctgccatttattcttctcgcccatggtcagcaaaaaatcccaatacttaggatcatcagacatcttcgcccattctgccataccgatatacatggttgcattagtccatgcccagtaagcatgtgagttggcccattgagaaccttttcgtacctgattttcgaaattcatcagttgccagtcggctacctttttcataatcgtcatggtttgcttttggcagtattcattccattgtgcctcctcgaagaaatagttcaagatgagtttggttaccacccggtgtcctttctcattgggatgattgctctggctcatatatatatttaaatcttctccattttttcttttctccttgaaggttgcatagcagtctatcagtcccgttttataatcgtgggctaaacggcgtatttggcgactatgctgttcaagtggagatttatcgtccaatatatcttcggttaaatcgggtgttggggttaggagaatgattgggatgttttgcttctgcgcttcctttatcattttctcccaggctttcaaagctctttccagtccgatgctgcggtcattcaaagcataatctatgaataaaatgtccggacgatgaggtaatacctcttgtttaaaccgtttggccccctgttcggcattttcaccaccaatggatgtggtgatagagttgaccactgcatatggatatatttctttgacagcttccaggacttgatgggggtaagcttgaagcgtttttacattaggtgtgttggcatagccggaaggtacactgtgtccatgaaatacaaggtttacagttctgttatccggccatttcttttgcagttcttggcggatctgcgtgaattcgatggattgaccggtttgggccatggtatcaaaccctaacaatgtgcataataatagatacagatatttcatgttcttcatttttattttttttctctactttcaaatagttcaatactctcggatataatttttcgaagcctttgctatcgctggtcatgattactctatttatgactcctcctccaatgggaaacgccatggggtgagttgagtatgctcattccagtatttctgctgggcatataaattatatgtcacggctgaaaaaaggatcaacaatatcaaagggatattcttgtgtttcatggctgaataaatatcttgtcgattatttcgttagtaagggtcacttccggagagaaatcgggtgaattaaggtagtttaccaggctgtaatacatctgccgtgcaacagggctatgagccataatccggtcaaaagcaatagaagtaaccattagttttcctttatccaccttagcttcaaaaattagccctatctttcgattgttgttccaatctggaataatctgcactaagggtttaaattcataagtagtatgatcaagtaacataggtttcgaattacgcaccaagtcaaaccattgccagtttgaatgttcttctgtaggaaaatgtttgaataaggcatgtttgggattacataaaatgcctaaagtatttggaggtgtaccagaccagactgcattccaggatatgctggaaaaacaagggggcacgtcagattttacttgagcagtatcagcaagcaacaataccgttcctcctttctgcaaataatgtttaactctattattccattctctggtcaacattacttttttttctgatatttcaggtagcttgtctgggtaaacccatatagcccagttattggaaaatgaggtgtttctaatttccatcttcaataccatctttgcagcttgacaaattccggtcaagggaatagaaatttttcccaagtcagttatgccaccattcggaatatctagtttaaaggagccatctttataaacactaccattcagatattcgagtttccagtccactaccgctccttttagtttttcttttaaaaaattggccatttgggcatctccttcaaaagtctcattttgagtccatactaacttatcagtacgtaataaaggaagacaaggactttgcatctgtttgaatgtttgggcatccacataaggcttagcgtcatagaaaacatcaacaactccgaccggtgaagtaccctgaccagggaagtcatttagttgaagtaaatgataacctccgaaaccaggggtacggaaataagattcaaattcttcttttttttgaagaacttggaacttgcctgaagcgatatgaaaatcatgagcctggtcaagcatttttttattacggagatcttctctaaaaagttcatagttataaggttttaaaacccctatatatttagatatttggttaaaatcaggataagcacaccattgtcctatctcatgagtcaccataggtattgagaacttttttacataatctatgtaatcatatcttgtgtttaatggctgcgagttaaaacgtcctttcagaccttcctgccaacgctgtggacgagcaccataaaaatcgaaaaaatcacttccttccactgtaggataaccagatgcagccacataaagatgacgtgagtctttcttccattcagttagcatttcttttagaaaatccacacaatcctttcctactaattcattgccttcgcaaaagaaggcaaaagacggatggtttccatattccttaaaaatgcgttgaacttcatctaaatagaaagcattggttgcttcatcttctcctaccgtaaaacgccagtccgagttttcgacttgtaaatacaagcccaattcatccgcaacttgaaatgcggactcagggggacaccaagaatgaaaacgaatgcaattgaatccgtaatctttatataccttcattacctttttccactcctcataactcatcggaggataaccggtaatggggaactcgcaggaatttacagcgccgcgaataaatgtaggaatatcatttatcgtgaaatgcgtaccttttgttccaaagtcacgaataccaaactttattttttgcacatcactcttaccgcaacactttatctcatagtcaatttcatacagattaggctcaaattcatcccaagtgtatagcttatctcccaaatcgtagtaatgtaccaagcgtattaaagaatccgaactatcaaaagttgtatttttctcctttagatgcaaatcttgagaatcattcaaaaaatgacaatttatccgtatatcgcctttaaccggtaggttgctatagtttacaatctgtgccacaatctttagccttttttctttttgtaaaggatatatctgtacatcagcaatatgtaccttacttacagcctggatttccatacgtccaataataccattccagttagtctgtgtttcagcactgatggcatgtgtataggctatatcatggatattcccattatctactctaatacgaacagtattccagtctccaaactttacataagaagttatatcatacaagtgtggtgtagaaagactttcctccttcccaacaaattttccattaacccacacttggctttcccaatgtactcgttccaaaaacagaaaaagttgttggtctttccaagattcaggaataaaaatattttctttctcataccaagctgctctactatattcaaacatgcgagtaagccgaagcgaactcatatcttgcgttttaaatccttttccagcttggtctgtagatcccggcagagttatttcttctggaaacctagatacaaaattacttccttttaccggaatactaatattcaaaggatctaatttgaagttccagataccagctaatgaaatatgatcttttgacgtttcattctgtgcgtgtactgaaagcagacaaaagcaacttaatatgagaaagaaaatattacgcatagagtcaatatttcaagttattcattacattattccagttcaccaacaaaagttacgacagactttgccggaacaacaatctcattagtttttattgccgttccctttcctaaattggatgtttcagaagtggtgtaaggagttaaagtctgattcttcagtttcaaatcttgaagattatattttcggttgacagaaccgacattaactgctaccaatactatctttttggaagaaccgtctttgtatgcgctaatcataacatctttaccctctttctcagggtctggattttcggtaataacggcaacacgtttcatacccggacggacaaaaaaagaataattacctagcatccacataagcttagagtccctggcaaatccatcttttttgcaatagtctgtaacttgtgaaccattatttgttccatcatccagatataccaaaccgtccttgtagtctgcacgggtaagagctgtccaccaagaccaagaggaagcatttaccaatgtcaaatcattgtgaatagtacgtgcaacaaaaagtgccgtttgcatacccaaatcgcgtttatttccgtttccgttaggaatttcggactctccggggctttcgaggatagaatactcagtttgccaatattttaagccgctgtgctcttttattttatcattcaaggctttacgatgtgatactaaatccttgacgggccaaacagtccaataactgtgtccagtcattactcgctctacattgggcagagaagcaatgctcaacggagatgacggattccaaaaatcatcaatctgattatcaaagttctcattatctacatttttatacaaatattgaatactcccagcttcgcccaatgctattttggtagccaatcctcttttgctgagtctttctgatagcaattttacgaactgagatatttcttcattagtggcgggagtcccttcctggctgcctttactccaatcccattgtggctcattcacaggacttaaataatcaaatttaactccttctttcttctgcaagttatcaatgcattctactaaaaagtctgcataatcaggcatcatacctgccttgatattcatccttttctctttaattgaaaagcctttcccatttatggacatatgaaccggagcacttaggttaaaagctagaaaacgctcaacccctctgtctcgagcagcttttaaaaaccatctctgtccttcatatttattccaattgtaagtaccatcagctgataaaaagcattcagaccgtctccactcatccgcaatgtcgctatcaagcccttgttctgtgcttcccgcaccaatgtaaaatctccacatggacaagccgatgccttttggatttccattttcatcgacttcctggctaaacagccaatcggcaatttgatttcttttctcttccggccaatattttcctaccatctgacagcgccaagcatctgatgccccaaagccgtcaatcgtctgcatttcctgattcaagtctactgaaatatttctcaccttattgtaaacaggtggttctggaatctccaatttggaactacatgccgtaactgaaaacagtgtacagatacctaatatctgcaaatatttgctatttctcatttctataaaatttaagtttgatctcttatgtttattagtaattaggattctgtgttacagtaccaaagctacgatctatttccgattgaggaatgggccataccaaatgtttattgatatcgaagttgatacctttgttctgtagctctttaaggttgctcgtttcatactgatccgttgattcatacatattgtaacgaacaaaacttccattcggaccgaacaaaccagctataacgggttgattagtgaccggatctatctgtctcctaatatcaaacagacgcaatccttcaaatgccaattccattctgcgctctttccaaatagcataaagtatttcgttaccggttacagttccttttttcggagaaagttttactcgagcacgaatgatgtctacatcatccattgcttcatcaaacatacccaagtgaaaagctgcttctgcacgcgtcaaatatatttctgccaaacggataattggagtattcaaaggagcgttatatcttttatcttccaatgtcctacgagtagcgataggaatatagtatttacggattacacgcccagacttattctgtgccaagtcaaatacataagtagggtttaaatcctcatcaccatatacagcgtcaccacaaaccgttattgtactgcgccttcttatctcatcttcttccgaaagataacaattttccaaatcgctggtgggtactccccatccccaaccatccataatgtcattggggtctttactggggaaattttccaaactttcaccacgtcctccacaaagtgtagaaaggggattgcccaaaatcttacccacttcagggcttgtctgaacttcaataagcgattctataccattgtgattattgacgttccaaatatccagaaaatcaggttctagtttacagccactattcatgattgtggtatctgcataatgataagcttctttccattttccttgatataatgaaactcttgctaataatgcagtacaagtccatacagtagccctaccttttccttcacttccatacgtagtatttaccatgtgaacggctgacttaagatcattctctatttgctgatatatttcttctttactagaacgtcctagattcatatcattggatgaaagcattttaagtaccaatggtacaccgccaaaattacctacaagatccaagtaattatatgcgcgacaaaatagagcttcaccgacataagacttttttttgtcttcagaaataggagcttcgggaatagagtttatggcaatattacatgccataatattcttatatctctccttgaataaatctgtaagatatcccattctattgggagtgatcaagtattccgaagctggactgaatccatcagtagattgtccggtatttcccatccaagcatcatcggtagccgtttcatttgttattctggtatgagctatcggctgccagtcattattcaacaatgcacgcttatacaagtcaatgacaaagtcacgacattctgtatctgtcttaaaatagttatccaaatcttgaacacctcttttttcgtgttcaataaaatcttcacaagacataaatcccaatgaagccgctattatgaaagcaaatatattctttttcatgatttacaatctattaaaatgttacatttacacctactgagtatatacgttgtactggataagtccatccgccaaatccaaaactcaacacgctacctgaaacttcgggctcaacgccgttatagccggtcaaggtaaacaagttttgtcctgctatatataatctcagtttattgacgccggggattttcttaaaagtataccccaattgtaaattctttagtcttaagtaagaaccatcctctatgtagaaagatgagaatttggtaaagttctcattatgatcttgagtagataagcgaggaacatagttagaagttccttcaccgtgccaagccatatcaagtaaaccgctcaccttattcacttttccaccactgccggcagcattgtacaattcttgaatattctgattgacaagatcattaccgatactggcatagaagtttgccactaagtcaaagttcttataacctaagttcagattaagtcccatcgtcatatcagcccatggagaaccaatctttgtacggtcatctgcattcaattgtccgtctccgtttatatccttaaatcgaatatcgccaacttgtgcgttaggttgtaagaactgtcctttgttattagtatggcgattcacttcagtctgattctggaagataccgtcagccacatatccatagaagaaagcaggttcttcaccttctattgtctttgtcttttcaccatttccatacaatggatctttatcacctgtcaactccgtcatattcacgttaaaagtagtcaagtttaaagtagttccaagggtaaaatctccccaacgatcattgtagttgattgtcatttcaaagcctttggtacgcatagaacctacatttgtccaaatcttggcatcacccgggtagccggaataactgggataagctttctgaaaaagcatatctttggtattctttatataatactcaaaagatcccgttaaacgattatcaaataatccataatcaataccaaagttatagtcttctacagtttcccatttcacatcctcatttttaaccaaactggggtaaacagtattcaccacattatcgcccaatacatagtaaccttgtcctaattgagacatataaactcctgaaggtagattctgattacctacacgcccccaacctattctaagtttaaggctgttaagtacagattttatactttccataaacggctcattagacatacgccaagctatagaagctgaagggaaggaagcccatttattcttggacaggaatttggaagaaccatccacgcgataagtagctgtaagataatacttatcattataattgtaagttagtctacctaaataagacaaaatagaagtggtagaagaattacctccggtctgtggattgacggtaccagcatccaattcatgtaaattatctgagttgttgggcattttttcatagcttccccacaaagtagtactattccattcttccaaggtgttacctaccataaaagaaaaattatgcttatttgcaaaagtttttaggtatgtcaatgtattctgcaaactccaattacgataagtgggtttgttacgcgtgaacttgttgttcgtctgaaattcatgagctgcatcaataacaaaatccggtgcaaacgtattggaaattcgagtatctaagtctatagagaattgagatctaaatatcaaatctcttatcggcttaatttcaagataggcagaagatgacaaagcataagaattattactttgattccatctgtgaacataaccaactggattccaaatttgagaaggagaacgggaatatacactatattcattttcagtaccatttaattcatcctcaggtttaaaaatgggggtaataggatccactctgtcaaagtccgaccaattagtaggattcccccatgattcataacgcggatttaatgagaatccagctgaaaaatacttattaaatttataatcattggtaaaacgagctgtaaatcgcttatatcctcccttctggtagaaagaatcttgctgaaaataatttaaactaaccgaatacttattcttctccgttccaccctgtacacccaaacttgcattcaattgaggggtaaactgacgaatacccgcatcccaccaatttgttgttttacctgcaaaagaagcgggattttcaaattcctccggatagccggcctgacgggcggctgtattcaatatttcagcatactccacagcatctgccatattataaggatttttcatttcctgtacgccataatgcatatcgagatagaatgaaggtttgccttccactcccttacgagtagtaaccataataactccatttgaggcacgactaccataaatggcactggcagaagcatctttcaagacttcaatgctctcaatctcattaggattaaggaaattgattccttcgcccataggaaccccatcaaccacatacaatgggtcagtggacaagttgatggtagagaaacctctaatcaaaacctttggctgaccacctggattcccggctcctacaattgttacaccagccacctttccttgaagactttcggtagcattgcttacattcattgatctcacttcttttcctttcacagaagagatggaacttgttaaatcactttttttctgtacgccatagcctactaccaccacttcttgaagcagctctgaatcttctaccaaagttacattaatgacagttctattccctaccttttctacaatggttttgtaagagataaaagagaatgacagtttggaatctattccagctactgttatactgtattgtccattcacatcagatatactaccattggtagttccttcttcttggatattaacacctatcagaggctcgtttttgtcgtcaacaatagttcctcgaacctttatctgcgcattagctgtaaggcagaagaagaaaacaacaagagaaaatataatatttcttttcatgactatatacatgatttaatgattattctttcaataatttagcacgcgcaatctcagtatcaataatgaatttataacttcccttttgatttaccttcaaataaggttggcttgaacccatataatcaataataccattttcaagtaagcgccaatatttactccagcccggataggtaatggttacattaagctgggtttcgttcaatataagagtccgtccaagtatatatggattttccgcgtccggtgtgagtagacagtttttattagagggatcccatccggcaccttcaaatccgtaaccacacatcgtgatatcaggagaatcgtgcacagctgaagaaggtatataaggagtcacagtatatgtttgctctttggtatttgccacaatttcatagtatccctttgttggtagcactattggtgcggcagaaggactatttagcaatttaccgttctcttctgatacgccaaagcagtgaggttcaaaagcgctctcctgtcccaaaaagtagatttccttattatcacaatccgcataatatttgaaagtaaatataccatttgattttttatgatagagcatcggtactccacaaacatcggctgttaaatcagttcccttaggaacatcggccaggaacaaagtaaccatttcactggaaacaatatatttaattttctgtgttttcctgttagcttctacaaagttatcaattgctgttatttttagttcatactcttccggtttggatggtaaagaataagttttgttgaaagagtactctttctcgccgtttaatttgattctttccatgatacccaatatcggttcttccacatatactgaatctaagcctgaatcatcagtgactttaaaggaaagtgacaattccatcttgctttccaatagctgtactgttccgtcttgtggtgatacatttgaaaaattaggagcattaaagtctccatccaaatgtaatgtaagctctttggtcacaacatttccagaaacatcctccagtgcaagatttactttatatacatcttcatttttcgtatcctttggtgccagaaactcataagccaactcatattctgtaactaaagtatctgtcgggaatacaatttccttatccagataaaattctggaatcacaattttcaaagacttaaggcctaaatcatcttttaaatcagccttaatcacaaactttctgttgggattagaatacaattcatcacgcaacacttttatttccggggcatcagatgtaggataggagataccctcatcgtccgaacatcccataaagcaaagcagcattaataatgctgataatctaaataaacttttcataatattaatattgttgttaactaatagtttatttctgagtgaattactgtacagggaaatgtgtcaattctggcacatccccgtacaataagatcaatcacatcctgaacacttgtttatttacatcaagtcttttcaccttttcataatattcttctgctagttcttcctttcctaatccgctgtaacctaatgccattacataatagcagtgtatttggttacggatattcagattgtcttcccatatggcaagctccggcaatgatactgcgaagtaatcaattttacagtcatcgaagaggtgctttttaccgtggtcgattaacttattgaagcggcttctggctttattctcttctcctaatgctctccaagcaagtccttgatagaatatcttgtcaggttgctggtcattatagtagaatgcttgctggggttctgtggaaccttgggttgctttcattaaatacttggttgactcggcatcattacccagcttctgataagctattcccttgtaataatcgacttcattttcttcagcattactcagtttaccttctcccaagttatgcggatagaattctgtctcttttaaaagtgcaacagcttctgaatatcgattctctttaatcgcctttttagctaattctacccgacagagtatgtattgccctgtcactttgccttcaccaccttcccatgggtggaattttcgattggatatcagatcttttgctttttcataatcacctaaaagattgtagagtgttatccgttcgatacataagtcgtctcgttgttctaccagatccagatgttcttccaggagtgccagacgttctacatgtgcccttcccatcttcttatataattggtctagttccataaatatgcgggagtctgttttatccagttcgaaagccttttccaatagctgtcgtgcttcttctttcttattccttttattgtaataggccagtgaaagattacgcaaagcagtggggaactgattgtttatttctacagatttctcccagcaactgattgcttcctcataacgacgatgtgcataccagaaattacccagataataaggagccttataatcagcaggattcattctcatagcatctgtcagtacattgatttcatcgattctgttggggaagcacttatcaggagatagactttgtgctttctgataccactgtcgggctacttcctcgtttccagaccttgatgcaaagtatcctaacatataagctgccataggatagacatcagttcgtccttccatatagatatgcataatttgggatgcttcttcatacattcctgcggaggcaaaatcaaatgcatactcgatatagttgtgtacgctgccattgagcatacttgtcatttcctgtaactcagtaagattattcccaataaaatatttctcaaaccggcatcctaggttaaacttatcaatagtcaatgactcttcgataaacttcagggctttttcagtttctccggaatgtctcaggatggaggtttttaactggcgtgctttatggttatgccaattgtggataagggccaggtcgacatgttccagagcggcattccaatcttttctgatactgtctatctgagccacaccgaagtatccggcatctctccaggctgcattccaggtggctttgtaataggcactatatgcttcatcatacttaccttgcattttcaggctccatcctaagttataataaggttctccatcatatggattaggattgcgctctgtcagtgtctttattgctgtatggaaatactgttcagcttcttcaaatttgccccggcgcatattcagtaagcctacggcattattacaacgtatatcacccggttctctttccagtgcttccatatagtaagccattggatcatacgttgcatgtcggtattgctccagatgtagcccggtcaggaagagttgctcaatagaagctatctctttaggctgtttggcagctttagccggatccggggtcggtttaatttcaggtttatcagctttatactctaaaagtaatttgccattattatcatataaagataggatcagattttccggcagttgctccgctatgtttacctggcttttgaaaatattttccggtgaaagtatggttactttatcaaacaggatttttcctgttatgtctctcaattctactttgatattttcttgtctgccggttgcatatacgatgatatgggcggtattttctgctacatccagattcagaatgaaatctttggtcgcattctttacatatcccacttcactatatggcaggaagtattgcttccatgacttttcctcataaggttgtaaccatgtgaaatcaggttggttatctgtataaacacctgtcatcaattctatgtaaggaccatcttcatcggtaaggtttctgtcccatgcgataccaaaatcaccatttccccaagtccattgtttctttcccggtgagaggtgatgatcggctacatgtaatagtcctgcctgtacatgctcttcgtagccacctacaaagtcataacgtgactttatggccatgtacgaagtggggacagggatattcttatatttggaaatatcgacaccttccgaatagtcctgtttgtaatatatgcctgtagctatgggaaaattggatacatctctttttccatgatcgaaaacagcatgtacatcgggtggaaaaaccgagtggtagtggtcgttcacaacaacggcagggttcgcccaccaaaggaaagtttgggggaacggagttcggttatagactttcacattaatttccagataagctttgtccggatgaagtgtaaatccctgcattcctttcgtattgaacatacgctctacttcattgcaccagaccgttttactaccgtctgcattttcttcaatcatacagtcggtaggtaagtatgtacttggacgatgatgctgaggccagttgaattcaattccgcctgatatccaaggaccggtcaaacctactaaagctggtttaatgacttggttgtagtagacaaagtgacgttttttcactttgtcataagccatttgtactcgccctcccaattccggcaagatcataattttaaggtattcgttctcgaggaagtaggcctgatagtctttttcttttttctcgtcgcatatcttttctacgacaggataagggtaaactactcctgaacttccttgataaacgcgcttttccagaaagatgggatttttttcttcctctccgatttcataagttggaagtttgattgtttctttccaaacttttacaattcctttttctgagagggtcggtttaattaaatattctgtaattttctccataaggtatttattgtttttttagacaataagggtaagttaagcgatgatttcttgtcatcgtttaagtaagatttaattcaataagtgatatgctgtttttaactagttaattctttctcaatgctttccagtgattttccttttgtttcgggtaatttgattttaatgaacacaaatccgagaatacatatgattccgtataaccagaaagtaccataggcacctaatccggaatttaataaagggaatgtatatgtcagtacaaaacaagctacccaaagagagaaggtggatactgccattgccataccacggatacggtttgggaaaatctcagataatacgacccacgtaacgggagcaagtgtcattgcatagcatgctatggctaatacaaccataattagtacagccatcccggttatattgaggtagtaacatatgcccatgatgatataaatgatggcaagccctgaagctccgaataacataagggagcgtcttcccaacttatctacagtgtacatacctacaaaggtgaatattacgttcgtcacgcctgttactacaatattgaataggatatcagaaacaccataacctgcagctgcaaagatttcctgggcatagttgaatactacgttcagtccgcaccattgctggaaggctgcaataactatacctattaacaatattcccggtatcttgccttgaaaaagcatgcggatatttaacttttctttagtggcacttataactgttttaatgctttcaatttctttttttgcatattcttttccacctatgtggcttagaatattttcagctttaccgtattgtaattttgtagccagccaacgagggctttcgggaatgaagaatataaggataaagaagagtgctgaaggtactacttctgcccagaacatccaacgccatcccatttgtccattccatgtttccagaatgttttcgccgggaactaccggttcggcgatcaaccagttgacgaactgggctgccagaatacctaatacgattgtcaattgattgatcgatacgaacttccctcgtacatggctgggtgatacttcggctatatacatgggagataagttggaagcaatgccgatgccaatgccaccgaatatgcggtaaaagataaaccaattgaggtcattgacagctcctgtacctattgcagaaacggtaaaagtgatagctgctattatcatcaaaggtttgcgcccatatttatcagataagctacctgcgattgttacccctattaaacagccaagaatggcactacccatgacccatccctgcataccgggagaattctcaattgcaaagaagatttcatagaatggtttggcacctccaatgactacccaatcgtatccgaagagtagccctcccatggcagataccagcgaaataagtaacaagtaaaaattgttgctaaatgattttgttttcatgatatacgatttattgtatggcaaatgtatgccataaaacttaataaaaaaatgcagattgttatcaatttaatgtataatcttattatatttatggctgtaaatgcttgaatatgttgactgaacaaagattcatgtaaaatactatgatatatatgtaaaatactaccaaaatcagataccatggaaaaggttgcagaaggttttaaaggagagaaggctatcgttacaccttataatatacgtaaccttcaacgagagaataatattacaaaacaattattcgtcagtcacatcggatattatcctcatgcagaaaatcatttcagggaaagggaaaaggggactaacgagaatgtctttatatattgtgagagtggttgcggttgggttagttataaaggtgaaaagtacatcctgactaaaaatcaagcttttatattaccggctaatgagcaacatgcatatggagcggacgaagtgaatccctggagtatctattggctgcatttctgtggcgagggtgtggctatgttctcctctataataggtaagactatatctttggaggagtcggataagagccgttatgatgatcgctttcaactatttgaagaaatgtatcagaacctggaaatgggatatagtcctgaaaacctggaatatgttagtttttgcctgatgcattttttggcttctttgaaatatattaatcagttcagagaaataaagaaggtgagagaaacggattttgtacagaagagtatctcctttatgaaggagaatatggagaataagattacgctggaggatatagctcagcatgtgggctattccgcatctcatttcagtgcattgttttcggagagaacttcttatgctccaatggaatattataaccaattaaaaattcaacgtgcttgttcgtttttgcaattctctgatctaaagatcaaagagattgctttccgtttagggtattacgatcaattccatttctcgaaagcttttaataaagagatggaaattactcccaaagaatataggaggagatataaataacttcagatataatgtgaaatgccccctaaaagtctgtagcaaacttttagggggcattttttaataaagaaaaattagttttgctaagctttagcttttgggagaactcagcttctttctatatacaatcaccattatcataatacctatcaccatcagagccagtgctgcataagcgatgccttctgttacatgcaagctcttcggatcaaagcgcatttcgatggtatgctttccggcagggacgtacatagaacgtaagatatagtctgcgcgggcaatgtcggcaggctctccgtcaatggtggctatccagccatccgggtaatagatttcggagaatacgatgacgccgtctttagagttattcgtttcataaatcagacggttcggttcgtaacttgtcagacgcacgctggaaagactgtctttatgggcagtggtaatgcctttcagaatatctttgaaacgagcatctactacggctgtctctgttggcaatatggtgttcagggcatcaatttcctggttggcattgtccacgtactccacattgttgacgaaccatgcattgccgtaagcgtatggattctcgataggaactgtctgtccttgtccggcagggaggatgaaatacttcgtgttcagcatattcagaacgcggaacttggaagcatccacactgtccatctcaccacctgcggtagcgatagcccgataggcggcctgcatttcgggggaaatatgacgatctatcatttcctgataacgtctcagtttggctgcatgatatccacctacgctcttgtgccagtaagaagttttattctcgctgaatgcatctccggaaaagcttaatacgcggtaattcgggtcagtgtcttggaggatgatttcatcagcttgcgttttcttaaaggtgtcaacctgggcagaacggggaacgaattggtcatcgtgcagataacgcttgttgacactccacatatctactacacagagaatagcgatgccggcaattacgagtgactttcttagttttccgctgtagtaaagccacagcaacacacagccaattacaatgataatgaagctacgcagtgcgtcggcgcttaccattgcagcacgcatttctgccagattggaaaggataccggatagctcgtttgcaggaatcatatgctgattgactgcattctgcaacatttgtgcttcctgtgcggggacgaaagttgaactgaaagctcctggaatcacggctaatatcaaagctacaccggcagtcagtgccaggctgataccaacaaactttatcttctttttcaatacctccggttcgtccagaatctttttcagagcaaagatagccagtagtggaattgtaaattcagcaataacgaggatggatgatactgcacggaatttactatacatgggtatataatcaatgaagaaatctgtcagtggcatgaagttcttaccccatgaaagaacaatggagaagaatgtggctccgatcaatgcccatttcaatggacctttgacgatgaagcagcctagaatgaaaaggaatagtacaaaagcacctacatatacagggcctgacgtcataggctggttaccaaagtattgggacagttgctggtagagtccggcataggtcggattggctttttccatggctgtctcattcagggcgaggggaacggaagcaccacctttaaagttgggcactaataaggtccaggtttcgccgataccataactccattgggtgatatagtcacggtccagtccgctactggtctgtttggcggcgtcaccggtttctacgagctcgcttttgccgcgcatggtttctttgctgtattcataagtgtgatacaggttcgacagattgacggatataccaatcagtgcagctaccacaagcacgccgcttgccttgaagaattgcggtaaggtcttgttgcgccatgcatcttcaaagtaggctcctgctatgaagaggatgacaaataggaagtaataactcatctgtacatggttcgacagaatttgcagggcaatgaatagtgctgtaacaatgcctcctgccagatatttaccccggtaagccagtacgatacctgctattgtaggtggtatataagccagcgtgataaacttccagatgtgtccggcagatatcagaatgaagaagtaggatgagaatgcccacattaatccacctaatcctgccaaccatgtaggtataccgaatgcacgcaacaagatgaaaaagcccagcatcaggataaatgtcaggttgacatacgtaggcaaaaatagttggtagaccttctgtacccaggtcaacggttgggttgactcgtagctgggggctatctgataagtcggcataccaccgaacagagagttagtccagcgtgtatactcaccagtttcttcgcgatattgagtcgcttcttgtccggcacctgcaccggcagccgtgtcatgttgaaaaagaatgcggttttctatatccgccgggaagaaataggcgaatgaaagtactgcaaacataaagatgaccaggaggtcagggaggagctttctcataaaaacggagtttttatgaaattgacaatagacaattgacaattgacaatggctatgcaggatgacagcgcagcttaattgtcaattgtcaattgtctattgtcaatttcgttgttttttaataacgatagtgttcggccttatacggtccgtctacattcacgcctatataggcagcttgttcgggagtaagctttgttagctttacaccgattttctcaaggtgcaggcgtgctacttcctcatcgaggtgcttaggcaggcggtaaacaccggtttcgtatttcttgttgaacaactcgatctgagccaatgtctggttggtgaatgagttactcataacgaatgacggatgtccggtggcacaacccaagtttaccagacgaccatcagctaacagaataatgctgtgtccgtcagggaaataatagcggtctacttgtggcttgatgttaacgcatttgataccaggataatgtttaagagcatccacctggatttcattgtcgaagtgaccgatgttgcagacaatagcttggtccttcatctgcgtcatgtggtcgatacggataatgtcgatgttgcctgttgtggtaacaaagatattgccttgtgtgcaggcttcttccatggttactacctcaaagccttccatagcggcttgcagagcacaaatcgggtctacttccgtaaccagtactcgggcaccgtatgaacgcatggaatgtgaacaccccttacctacatcaccatatccgcagactaccactaccttaccggcaatcattacatccgtagcacgcttgataccatcggctaaagattcgcggcagccgtaaaggttatcgaatttggatttcgttacagagtcgtttacattgaatgccgggaacagcaatttaccttcttcctgcatctgatacagacgatgtacgcctgtagtcgtttcttcagaaacaccacgtacttcggctgctacacgttgccagcgagtaggatcttcggccagtacgcacttcagaattgcattcagttctatttcatcttctgcatggacttctttgtccaggatagaagcattgctttcggcttcatatcccacatgtatcatcatggtagcgtcaccgccatcgtcaacgattaccgtaggacctttaccgccggggaagttcagtgcctgaagcgtacaccaccagtagtcggccaacgtttcgcctttccaggcaaatacaggtactccacttgcggcaatagcagctgcggcatggtcttgagtcgaatatatgttgcatgagcaccagcgtacttcggcacccagtgccacgagggtttcaatcagtaccgctgtctggatggtcatgtgcagagaacccatgatacgagcgcctttcaacggttttgtttctccatacttttcgcgaagagccataaggccgggcatttcttgttctgccagatcgatttccttgcgaccgaagtcggcaagcgtaatgtctgccaccttgtagggcagagtagagaataattctttagacatatctatcaatgatttaaaataaaaagtgatgcaaagatagaacattctgattagtaggacaaaagctattggttttttttaaataaaagcctgcaatatgtgttgatataattgaaaagatatgctatatttgctccccgaaaatgacactctacaacatatctgccttgaaatgagggattataaagataaaacgaaagaagaactgctggagataatccgggaactggaagaacagctggcaagccgctccctgctgaccgatccttgtccggatgaagagccagaacgcttccgtgagaaatatggcaaagaaatactggaggctatccctgatatgttgacggtttttgatcgtaatctggactacatagaactactttcttctcctgataccaatcacgtggaaggtctgtccggtaaagataagtcgcatcctaacttgaaggatatagtgccggaatcagaatatcgtaagattcgtgctaatatggaaaaggtggtgcgtaccggtttccccagtataggggagcattcgttacagtttgaaggtgagacgcatcattacgagaatctggtatgtccattgggagataaatacttgttgtgtatgtgccgggacgtgacgagtcgggaaaatgcacagcgtgagttagctgctgcccgtgtaaaagctgaagaatccgaccgcttgaaatcggcattccttgcaaatatgagtcatgagatccgcacgcctctgaatgcgattgtaggattctcaagattggttattgatccggggcatgatggagacaaggatgattactgcaacattatcgagcagaattcggaattactgttgtgtctgtttaatgatattctggacttgtctgctatggaggcgggttctttgaggtttgttaaggagaaagtaaatgtgtatgcagcctgtcttgaagaatatgaaaggcaccggatgaaagttaataagggtgtgaaactgacgctggatgatgttgacaagaatctatatgttatcggagataggatgcgaatcatgcaggtgctgatgaacctgttaagtaatgcagttaaatttactccgtccggagagattcatttcggttatcagcttcggggaaatgtcgtacaattctatgtcaaagatacgggtatcggtattccggccaatcgggtggctaagatatttgaacgtttcggtaagattaataactttgcgcaagggaccggactgggattgactgtttctcgtatgctggtggaacggatgggtggacgtatttgggtacgttcaggagaaggaatagggacgacgttctactttacgctgccgatgacttaaagatattatgaaccaaagaacctgctctctttcatactttagagagcaggttctttgttctttgaagggctgccagagattaagatcagatgatttctatcccctgttccttacaaagctgtagccctacatctttcagtttgaatttctgtatcttaccgctgcccgtcatagggaattcgtcaataaagaatacatatttcggtatcttgtaacgtgaaattttaccggtacagaagtcacgtacatctgattcgtgtatatccgctccttccttcaatataatgaaagcacctacttcttcgccatatttcttcgatggaatgcctgccacttgcacatccttcacaccttccagtttgtaaaggaactcttcaatctctcgcggatagatattttcgccaccacggataatcatatctttgatgcgtccggtgatgcggtaattgccgtcttcatctttcacgccaaggtcaccggagtgaaggaaaccgttcttgtcgattacttcggctgtggcttgcggattcttatagtaacccttcatgttgttatagccccggttgcacatttcgccttgcacgcccaccggacattcttctccggtttcgggatcaatcaccatgacttctgtgtgttcgaaatcgtgtcctacggtattgcaacgaacatcaaacgggtcgtcaatgcgtgaagctgtcatgcccggcgatgtttctgtcagaccatacacactcgtaactttcatatacatcttttcttccacctgcttcatcaattccaccggacagagtgagccggccatgatgccggtgcgcaggctggacatgtcgaacatatcgaacatcggatggtgcaactcggcaatgaacatcgtgggtacaccgtacagagccgtgcaacgttccttatgtatagaggcgagaactaccagtgggttgaagcgttccaccattacttccgtacagccatgtgtcagacagttcatggtggcaagtactacaccgaagcagtggaagaggggaacacaaacgcataacttatcgtcgctggtgaacttcatgtgttctcctgtcagatagccattgttagctatgttatagtgggtgagcataacgcctttcgggaatccggtggtgccggatgtgtattgcatattcactacatcatggcaggttacctgactttttagattattcagacattcgtcttccacattgttacccaataagaggatttcggctgtattgtacataccgcgatgtttctcctggcctacataaacaacgttgcgcatgtgcgggaaacgttggctcttcagatgtccgcgttcgcaggttttcagttccggcagcatggtgtaagtcatttgcacgaagtcgctgtctttttcaccatttacaatgcaaagggtgtgcatatctgagttttcgcacaaatattccagttctgcctgtttatagttggtgtttacggtgacatagacggcacctattttggcgcaggcatacaggagagtaagccagtcgggtacattagcggcccatatacccacatgggtgccgcgttccactccgatagaaattagtccttttgccatgtcgtctacccggcggttgaactggctccaggtgaagcgcaggttacggtcagaataaacgatatattctttgtcgggcgtagtttctgcccagtgctccagccattggccgagcgttctttcgtataacatgaaaatagtgattaggtgtttagtgataggtgattagtactgggataattagtgtcaggttagtgataggcacagtgcttatcactaaccactgatcatttgccactaaatgggtgtatagattactgcaagaattttggctgcctgtccttcataagcatgcacgtggtggggaacgatggaatcgtaatagatgctatctccttcttcaagcagatatgtatttttgccgtagcttatttccatgataccttccataaccattataaactcttcaccttcgtgagaggagagtacgaaatcactatcttccgtagcagctacgtcgatgataaacggctccatgtggcggtccgctttcgacttggacagggaatgatattccatgtgcttacggctctggatagcattattggagaagctgatactgtctttggcttccgtcttgcggcagatggccggacccgtttcatcctgatcgtcaaggaaagttcccaggcgtacacccagaacacgcgctattttgataagtggagccagtgatggcaagtcaatgttattttcaatgcgttcaatctgttctacggctaaaccggaacgttcggccaattgctcaatgctgattgactggctttcacggagtgactttatcttttctccgacaatcttgcttgtatccataattgataatgtttttcgcctattaggttataaattgtattgttaaggcacaaaaataaaacaaacttttacttggtgcaacaatccgtgcggaaaaaaagaagcttttattgattttatcagtttacgattctatttacaagactaccttctatttgcggattcgcctggaatacatacattgaaagatttttttgtaagtatgactcgcttcaatgggaaatttggcgatgctttaccttattgtctttttgacattttgtattttttatctgctgaggatgcgttatattcgtccggccactcataaatacaaaagtattcaagttaaaatctgcaagggatagactattagcgtggtatcgaaatatttacattttatttagattgaaatcttccttaaaagtgtactaataggtacggaacctgacataaataagtgtattctccgtaagtagtaacccttttctccataagtagtatcccttttgtctctaagtagtaatgatatcacctctaagtagtaacccttttctgtataagaagcatagataagtgaaagaatatgcaaatatagcgtattcttattctttatctatccataaaacattctggattgtgactttttaaaaaggtgtatgttgtagaaatgacgaatatagaatcattttggtgataaagttcccgtatatctatgattatggcaacagtcacttttgcccgatttatcatttacttatctgcgctccgtttattttaatttcagtattaggaaataactcttttatgcgctctattccttttcctgcaatttttccggataattctaatttcccgattttcacttctgagagttcataggggatatcaatctcattcgtgaattctatcttcaagctcttaatctctttcagttccaacagaacgggagggaattcttttactttgattgatataccactgccaataccttcctcttgggcttctactcttaatttgcttaacagtcctttatttccaatatctttttttctaatcatccagctgatctgaggtcttagggcaaaattatctttgttctgttgcaagccaatgaagccggaccatagttctaatggcgtttctataatcgtatcattgcgtacttccagatatttcaagtcaactttcacaatctcatcgggcaggctgttaccgccttcaagctgcttcagattatttcttcttccatttttgtcgtacgggaagaattttacgatccatccgtcaatgatgtcgggggctccgtatttcttttgtgagtgatacttgaacatattacgccagaagtctttgttcacttcaccttttgatgcttttacaaactcctccaaaagaggttccagttctgaaatccaccattcaagtttatattccttcaatctccgggctttgtctaaaaccttttcccaatcttccggggtcccttcaagtgttatttccgggattccgcaaacaatatacatcacgataaattcaaaataaggtttcatggtttccatgattgttatttcggaagccaccttttccagagaagtggttgtagagaaattgcaggtaagtgtttcaactaagttgcttcctgtatggttacttatctggttggtaaattggggaaaaatctcttcccatgaaagggtggggtcttccagtttcttatttgctttgacgattaaagattgctttccggaaaagtcgacaaaaagatctctcatagattcttggtttgcatttacatgtcgtgcaaatccctggttgattaacagccagatcatgtcgggagataaaacaaacggtctgtgattggcataggcctgatacataccgtagaagaaggaattatagttgtagtttaccagactgtcaggcgcttcgcttttggcgataatattgaaaggaacatttatattcttttcttttatttcgtaagggtatattttaaggtcggacagtataagacctttataaatatcttcataagattttatgaaaagcaacttctcaggctttgagaggttttcaactttgaacgtggtcccgttttgagcgaatgtcgaaatgcaaccaaccattaataagcaaaacagtgtatttctcatagtgctgactttgttgtttatacattgaaatcttcaggaaacaaatataacaataaatggtggatagaaggaaacaaaaaagggaagctttttaacggcttccctttttaatgcttttgctgcaagtaacggattacttacgcagaccgagctctttaatgatggcacgatatctggtgatgtcgcgatccttcaggtagttcagcaacgcacggcgttttcctaccaacattgtcaaggctctttcagtactataatcttttctgttgagcttaaggtgctcagtcaggtgggaaatacggtatgaaaacaaagctatctgggcctcagctgagccagtatcagtgttagactttccgtacttgccaaagatttcttgctttttagcagcgtctaaatacataacttttaattaaattgatatataaattttctcttacgaggctgcaaagatagagataatcttttatactgcaatgatattcaatgaaatttttctcttgctgcaactatatctaatgcaaaattcgtacctttgcaccgcgaagataggctgcacctcggcagaaacaaataaatttgctactgcgctcggtttgcactatctttgcacccaaatatataggtattgtatgcaaaatattagaaacattgcaatcattgcccatgttgaccatgggaaaacgacgcttgtcgacaagatgctcttggcgggaaatctgttccgcagcaaccagagcacaggtgaattaatgctggataacaacgacttggaacgtgaacgagggataacgatcctttctaaaaacgtttctatcaattacaaaggaacaaaaatcaatatcattgatactccgggacacagtgacttcggaggtgaagtggagcgtgtattgaacatggcagacggatgtatcctgttggtggatgctttcgaaggtccgatgccccagacacgtttcgtgttgcagaaagctctgcagattggtctgaaacccatcgttgtggtgaacaaggtagacaaaccgaactgtcgtccggaagaagtatatgaaatggtgttcgacctgatgttcagccttgaagctacggaagatcagttggacttccccgttatttatggttctgcgaagaacaactggatgagtacggactggaagactcctactgataatatcttcgcattactggactgtattgtagagaatataccggctcccacgcagttggaaggtactccgcagatgttggtgacttctttggattattcttcttataccggacgtattgccgtaggtcgtgtacatcgtggtacgcttagagagggaatgaatgtatctctggctaagcgcgacggaagttttgtgaaatcaaaaatcaaggaactgcatacatttgaaggtatgggacgcgcgaaggtatcggaagtttcttccggtgacatctgtgcgttggtaggtatcgaaggctttgaaattggtgatacgatctgtgactttgaaaatccggaagcattgccgcctatcgctattgacgaaccgactatgagtatgttgttcgccattaatgattctcctttcttcggtcgtgatggtaagtttgtgacttctcgtcatatccatgaccgtttgatgaaggaattggataagaaccttgccttacgcgtacgtaaaagtgaagaagatggtaaatgggtagtttccggtcgtggtgtacttcatctttctgtattgattgaaaccatgcgtcgcgaaggttatgagcttcaggttggtcagccgcaggttatcttcaaggagattgacggtgtgaagtgtgagccgattgaagaactgacagtaaatgttcccgaagaatattccagtaagattattgatatggtaacccgtcgtaagggtgagatggtgaagatggagagtgcaggcgaacgtgtaaacttggaattcaatatgccttcgcgtggtatcatcggtttgcgtacgaatgtactgactgcttctgccggtgaagctatcatggcacaccgtttcaaagaataccaaccgcacaaaggtgaaatcgaacgtcgtaccaacggctctatgattgcaatggaaacgggaacggcttttgcttatgccattgataaattgcaggatcgtggtaagttctttatcttcccacaggaggacgtgtatgccggacaggtggtaggtgaacactcccatgataacgacctcgtgattaatgttacgaaatccaagaagttgacgaatatgcgtgcttccggttcggatgataaagttcgtctgattccgcctgtacagttctctttggaagaggctttggaatatatcaaggaagatgagtacgtagaggttacaccgaaggcaatgcgtatgcgtaaagtgattctggacgagacagaacgtaaacgtgcgaataagaattaaagaatagtggagatgagttaaactcatcaaatctaacgaaaaaagtaaaggtgggcattcgattagaaagcccacctttacttttttattttagtttcctccttgccagggtaaatcttcctgggcactgttttccagttcggtttcttctacatggatgctgacattgcttcctgtaccaaaatgatcgatatcggaaatgacaatcgtatgcatataatttctcttgaaattgatagcatagtttaatatatcctcggcttcttttcctgtccggtgcacggtgactttaacacgggcattatcggtcagaatctttcctgtttcaacaagggtcgtcaaggttctcatggaaaccataagctcgggtgattctttcttatcaggagtcaaccatacagtcggtgcaccatctatttggatttccagtttgcaatcagcttgtaatccgttctgtttgaattgtacaccgaagtaccggcgataaacttccagtgtatttgtctggtcgggcgctacggtcaatttgtcgatgataccatggtatctttgaataaaaggacgggtataattgctctgtcccttggttcctattttggagttttcaagatcgaaaagatattcttgtgtgccatccggtcgttcggctgtaatgaatttattcgtgattgtacctaactttggatcgtttcctttgctgagtgtcagtggataaagtgtcccatctttagtcaataaagagtcctttccttcttttatcatcgtacacgagatgcggtattgatatccgtcgaggacattcaacttcagattccctgctttgatattgtcaaagatgccataagcataaggcttttgagtgactgacccgttgggattctgtatgagcatggctacatttataccgaaaatctctttcgaagcatcggcacggctcattggcttttctgtgagggaacactcgccacctatattaaggtccagctcagtgtaagtaggctctttctctttataaacatcttctcctttaaggcaagattgcagaatctgactcaggacgactaatcccgctaaaattaaatgttttgttctcatatatctgtttgtttgattatccaatgttttgatgttcttcttctgtgggatccaaatcggtgttgtctccttcaaatgagatagaagtattttcatcgtaatgcttatctatatttataatctttatcagattctttttatttcgttgaatggtaatggattggtttgagataatgctggtccattcttcagcgttctttggacggtaatagacgttgataggcagattttctgtggcgttgatattgccgtttccgatgttggcgacattttgtagagaaaatagcctctcttccgacatggaaaaggaagtagtggcatcggtacattctatgagaaatgctttggcattgctggtttctactttgatggaatctcctatagacaagttctcagctgcaaatcgcagagtataatatgctcttttcagttcaatagaaacaaactttgccggacgattaccttcggttacgggatcggcattgatcaagtcaagtgttgcgctaccgtaaaagcgatgtgtgtccgtaggacgttcactgatgtcattggcttccaggtgcatcgctcctttataaatgtgttggtggaaattttggttttcgtttagaggattgatggaaataaccagcttattggtgacagcggcatctacccgtttatctgttgtgatagaaaatgggagtccgaaatatccattgttgttataaggaagttcattctttttcaggaaggtgcagtcgaaccgataaatatatccttcaatcagtccgatgcttatatctgaaatatcttcaaaaagtccggttgcataaggctgaaaggtagaaccctttttccagaaaacattcactgcataaattccggcttcctgaactgtagctctgcttaaaggttgtgaatcatattccagagaaggcccgatttgtaggcctatccagatttcttttccattgatatcaggagtattattctcatcagagcacgatgagaataatatcatccagataagagctataaataagctatgtgtatctgctattttcatacatttcaagtgattatcctacaaatgtagtaaataatcttatgcaaatggagatgacaatgcagaatctttaaaaaatctttaatctatgaatttaatcttctccgcatttctcggtttagctgccggagtttcatccggataaccgaatgcgatgcaatagagcaactcatatccttccggaatatcgagtctcttcaaatattctgctgcatccggtgtggagtttataaatcgtgtcggtcctcctaaacaacaggaacctatacccatagaccaagctgagagaatcatgttctcacccaataaaccacagtctatttgtgacagatcataagacttgtcattggcgataaatactattgtaggagcattgcggaacatattcttgaagttaggatcttcggcagctttcggattctgtttcttgtaaacttcggtgataccattgataaaatccggattatccactacccggattgtccaggactgcttgttctgaccgttgggggcattgataccgcagttcagtataatctgcatagtatcgcggttcactgcttgcggcttgtatttacgaatactgcggcgtgacatcatattctcaattactgcattttcattgcttgctctctcagtcacagttgtactctcttttacttgcatgccgcatccgcagcacagcaacaggctggcacctgctaacatcaatttgatacttttcatattgctttgtttaatattggttttcgcaaagctaacaaaaaagatttagtaatgaagtgattccaattcttttcttaccagccagtatccaacctgtgcttcggatatgcctttaatcagttgataaggacatataaattgatcgttctgaattcttgaatccatataatagaaagaacatgcactgtctttctcaaaatgtttggcatattccagaatgtgggtcgatataaggaatgagcaatgcaaatactttttgagtaattcgtttactgcgacagaagcttcaaaggcatcctgtgcgtttgttccgcgaaacatttcatccagtattatcagacatcgcttaccggatttcgctttttgaagaacttctttgattcgtagaatttctgccataaaatgacttctgccatcgcgcagggagtccgggaggttgattgaagtatagattccatcaaaaacaggacagatcattgaacgggctggaaccggtaatccgcagtgcgccagccatacagcgattgtgatggctttgagggttgttgatttaccggccatattggagcctgtaagaatgcatatattgccgtttgacatcttccagtcgttacttcgtccctctttggtgaacgggtgtacaaagccagtaatagataaatccatcgtatctgtcatttccggacagcaacagaaacctctgttgattgctacatgctgtgctgtgcggcatacgtccagcatataaatttgagaaagtaaccctctgatcagttcaaaatggatacaacgaaacaggtaatcgtatttgtcgatggtatagttggagggggatttctctttatctttatagaggtcgataacttctttcagttcgctgccatgtatagtgtcctgaatgctttgtgctaattctttcaatagtaaaggggcattttccagggtgttttttcgcaatgtatccaatcggttcaataacaggataattaaggttacacctcgtctgatgatatagcgttgagcgtcgtgtcttaataaacggtcgaatgctgaagtcagcgacactaaaatattaggtcttctgatctgatcacggtattccagataatattcgataaagtcgagctcttcttcatccaaaggaagttcgggtaactctttccaggctatcgcttcttgtctttttcgtatggcagatatatcgttcaggggagaggtaatccaatcgagcatcatgcgttttccgtttttagtctcagttccggagaataaggagtagaggggatattcgtcatatattccttctgtaatgctcaaatctgcctgcgtttgcttgtccgtatccagataagtcatattcttaggtattacgtatagcgcaaaagtaggaaaataattaggaagaacaaacgaaacagataaaaacaagaaaagcggctcttgatatcaagagccgctttcgcatatatatctaaactggttttattcagattagagcttcggaccagcagcaaccagtgctttaccagcttcgttaccagtgaacttagcaaagttcttgatgaaacggccagccaggtcttttgctttttcttcccacttgcaagcacattcgtaagtgtcgcgaggatcaaggatcttcggatcaacgttcggcaattcagtcggaacaacgaagtcaaagaaaggaataaccttagtaggagccttgtcgatagaaccgtcaaggatagcgtcgatgataccacgagtatctttgatagagatacgcttgccgctaccgttccagccagtgtttaccaagtatgccttagcacctaccttattcatcttcttaaccagttcttctgcatatttagtcgggtgcaatgacaagaaagcagcgccgaagcaagcagagaatgtcggagtcggttcagtgataccacgttctgtaccagccaacttagcggtgaaaccagacaggaagtagtactgagcttgttccgggttcaggatagataccggaggcaatacaccgaaggcatcagctgacaggaagattacctggtgagcgtgaggacctttagataccggtttaacgatgttattgatgtgatagataggataagaaacacgagtgttttctgtaacgctcttgtcagtgaagtcaatcttaccatcagcagcaacagttacgttttccaacaaagcgtcacgtttgatagcgttgtagatatcgggttcgctgtctttgtccaagttgataaccttagcatagcaaccaccttcgtagttgaatacaccttcgtcatcccatccgtgttcgtcatcaccgatcagcagacgtttcgggtcagtagacaaggtagtcttacctgtaccagacagaccaaagaagatagcagagtcagtaccttccatgttggtgttggctgaacagtgcatagaagcgatgccacgaagcgggttcttgtagttcatgatagagaacatacccttcttcatttcaccaccgtaccaagtattcaagataacttgttcgttagtcttcaagttgaatacagtagctgtttcagagttcagacccagttccttgtagttgtcaacttttgctttagaagcgttgaaagatacgaaatcgggttctccgtagttagcgagttcttcagcagtcgggcggatgaacatgttagttacgaagtgagcctgccatgctacttccatgatgaaacgtactttcatacgagtactttcgttagcaccacagaatgtatcaacaacgaacagacgtttgccgctcaattcttttacagctttagccttcaggtcagcccaagcttcttcagagcaaggtttgttgtcgtttttgtattcgtctgaagtccaccatacagaatccttgctggcttcattcataacgaagaatttatctttaggagaacgaccggtatagatacctgtcattacgtttacagcacccagttcagttacctgacctttttcaaaaccttccaaacttggtttggtttcttctgcgaacagtacatcataagacgggttgtggatgatttccttcacgtctttgataccgtacttgcttaaatctaaatttgccatttcttttaatgatttaaaattttggtatttggtttataatctcttgctaatatctttttaccttcattttcaaggggaaaattggtatgaatcaaggtatgtttcaaacagccccttgtttttcgcgtacaaaagtagtattttctttcgaaacaaacacctgattagagaaatttttctttaatgagaagtcttttataactccataacaatatctgcaaactgaatgttgcaaattgcgcaagaaatcgtttactttgcgcataataattcaataaactatcatgaagataatcaattttgccgaaacaaactccatcctgaaccagtatgttgccgagatccgggatgtgcaagtacaaaacgaccgtctccgatttcgccgaaacattgaacgcatcggggaaattatggcgtatgaaatgagtaaggactttgcttattcgttgaagaatatccagactccactggggatagcacctgtgcaaactccggacaatcaattggtattaagcaccattttgcgtgctggactacctttccatcagggctttctgagctactttgacgatgcggagaatgcattcgtttccgcttaccggaaatataaggatacgctgaagtttgatattcatattgaatatattgcttcaccgcgcatcgacggaaagacgctgattattacagacccaatgttagcaaccggtagcagtatggagttgagttaccaggctatgctgacgaaggggcatccggcggagatacatgtcgcttctatcattgccagccgtcaggctgtggaacacattgctgaaacactccccgaagacaagactactatctggtgtgcagccattgatccggagataaacgagcattcgtatattgttccgggactgggagatgcaggagatttggcattcggcgaaaaggaatagctaccaataaaaagtttccccaatctatcctcactaccctcactttggggatagatcaataataattaggatgttaagtgtggtggtagtaaaaaatcctgtgtgagggtaagtgggttactctcactgtgtgtctcgtcctggttttggtccataatcagcccttaacggaatgggacattcatttgttttacatcagctgttattctgtttataatcagtgaaatatctcatttagcttaggaataatcaggtgttgaccttggttaaccggccgattaaccttgattaataggctagtcaaccaaggttaaccggccgcttgatcaaggttaatacccaataaggcttactgtagaatgcaaaaagatctagggtaaagacagatgattgcctgtttgtttaggaatgctttctaatggtttggttgcagaaggtatggggatgatctttattacaatggtgatttggaatctttagtcattctttccgtaattgcgctttataatagtggcctgaaaggcttttttaccggccagtagcaggtcttcgtcatcaaaggcacgaaggctgtaccaaaaaagaaaatctcccgtaccacccagaataccgaataatcccagaaagaatatattggcttctcctgtacagaatccatggattgcaggcatcactcccaataagatgcccggtaataataaggatacccgatagaacttcaatggaataggacgagtcagagaaaatcctactccagtccagtcaaaatgccagtgtaggagctttttatcctttccgctaaaccagtaaagaatccctgcctggattagtatataaaacacgaggagtaaaaatatgcaaagcataacttggggactactgattccttttacagtggtacccaataaacgaccggcattataggatgaaggttcgtcccatacataaacaaatagatagctacctatcaggaacagaatgaagaaaaacagaaatcctcttatgttgatagactttgctgtgagtttcacttccactccatccgggcggttgaatggttccttatttgcttctttcttttccataattcctttttactgatttctacgctgcaaagataacaagagtatgaaattaatttaggttatcagaatgttatctttatgttaagatggaaagaaaagtttatctatatttgcctgaaatatagaatgcttgatgaaaaagtcgtattatatacttcttacaataactgcaacagcagctgtcctgtacttgcttggaaattgggtaggacgaagtttcggactgaaccggcagcaagtgatacgtaatatccacgaagcttacggccgtgcgacggatgcatttgaagccggacaaactaaggatctggctgcctttttccgtcatgaactggatgaagtggatttgaagcggatcaagtttcacttggatacggtatctttacacggtgattctatcgtattgaaacaggatttgcgatatttttctgattatcggaaactgttggagcagcactataccttcgtgtgccctgtgaatgatactcaaggagtacatgcttacatccagaatcttcgtgcggggttcatcggcaaactgctttatatgttcttcggaacgatagtggctttgggacttctattatttgccatacgtaagcaggtggatattatccgccggcaggatgagttggcacgaatgcgtgaagatttctcttctgctatggttcacgacatgaagaatccgatcagttccatcctgattgggcttaaagtgcttcgtagtggaaaggtagatagtaagcctgagaagaaagaaaaacacttcgatattctggaggcggaagctcaacatttgcttgcactggccaataaagtactgactatctctaaactggaacatggacaattactgttggataagaattggattcaacttcgtcctatggtggatgagttggtacacacgttcacggctaaggcagaaaagcctatcacatttcaggttgatttgcaggcagagggagcttatgctgatgaggagtatttgaaagaggctttaagtaacctgatagataatgctgtgaaatattctaaggatacaatagatatacagattacttcctgcctttccggacagtatattcagatcagggtgcgggataatggaatcggtattccgcttgcggctcaacggattgtatttgataagtttgaacgcgtcattacccggaatgaggatgagaagaagaaagtatccggtttcggtttgggactgaactatgtgatgaatgtagcccgggagcatggagggtatgtcagtgtggagagtatagaagggaaatatagcgaatttactgtttctttgccgttgccggcggagaacgaagaggctaatccggaggattgatattctcttgtcgtatatgagcgtgaccgggcctgtcttttttttacagacaagccggatcacgttcttttaaattgttattctacaggtgggactgaacattacggcacgataccggtgcaaggtctggagagcttactgggaaaaccggtcaaagattaatcttctacccatagtacagtgatactagaggttaatgtacgcttgatacagatatacactaattcttttattatcaaagggaaaggacaggaaaacttagaaagcgcagttattctaatactccttctggaattgcagggatcaaattgaagttccgataatgtcagtcagttctgttgtttcttgttttctcctaatgggaactccggttttctcttgtggaaacgctcgttccctttaatggaactgtactgtattgacttatctttttgttctataactgaagaggtgtctactatacctcttttcccttattttattcaaggtaatgcctctgtacttacataacccattccagataattctctggcgtgatgactacagtctcttttaccggataattattcaagaagggagatggaaaggtgatttggcgtttattaggattccacttcatttcaaaagcggtgaagttgccgtctgcttcttctatatagtctatttcttgttgttgagtggttctccagaagaagctttttgcataattcccgttgtaatgatttgctttgatgcgttcgctgatgaagaagttctcccataaagcgcctgtgtcttggcggagagatagcggtgcaaaattctggatgacagcattgcggataccattatcgtaaaaatatattttcttgctctttttgagctctgttcgtaagttacggttgaaagcattcaggcggaaaatgacatagcatttctctaataagtcgatgtatttttctacggttttgttgtcggtcccgatggtttgcgctacttcgttataggatacttcactgcctacttgcagggcaagggcgataagtaacttttccagcagtatggggcggcgtatctcgttcattgccaacaggtctttatacaggtagctgttggctatgttcattaataattctttagcctcatcagtatgattgataatgtccggataagaaccgtatataagccgggattcaaacatttgtttgactggcaataaaccttggctgtcatataattctgccgtagagatgggatagaggtgatattcatattttcgtcctgtgagaggttcgctcagattactttgtaattcaaacgatgaagaaccggtgacgagaagctgcacgttggtgaaattgtctgtaatgcgttttagggttaaacctatttctgatacacgttgtgcctcgtttattacgataattctgttgttgccgatcagcattttcagttcggaggtattgatgttggctaacatctctttcacttccggttcgtcgcagttcaatgtcagtactgcttcttttcgtccctgagtgatttgattaaatagtgtactttttcctacttgtcttgcaccgatcaggataatcgcctttcctttgaatagcttactctcaattaccgactaaagtcttctttgtatcatctctttcatcttactttatttcaaggtaaatataggcttttaatgcttaaatcccaaaattatatatgatatttgggattacctgttggcgggattaattaagaatggtacagtaatgaactaaatgctgataatgatttaggcgcggattacgcggattacacggattaatggctgcgctatcacactatattacaggaaaagaatccgtgtaatccgcgtaatccgcgcctaaaataatattcataaccttatagtaatgaattaatccctctaataagcagattcgtccttcgcaaaaagcctcattaccgtactatataatagcagcggtaatgaggcttttactgaaaaagaatattgtatttgcttacttcacttcccaaatatcatttgtcatcagcagttctttgaagttgtgatacttcttctttgctgatacttcttcaatctgttccattacagcatcgtcataagtcggagcttctacatcgcggatcacaccgagagcaaccgggaagtcaggaccttccatcagagccaatttcagttgcaatgtattatccatgcagtgtgcatcatgaacgaggatatccttttctgtgataccgttctcgcccaacttcacaactttcagtccgaagccttcctgcatcaatccaaactctttgttctcaccgaaaagcatcggcttaccgtgttccagatagatagcattcttggcacgtccgtccttgttgtatacagagtcgtaggtgccgtcattgaagataacgcagtgttgcagaatctcacacacagcggctcctttatggttagcggcagccttcagaacttctcctgtgccaggaccatctgtagctacacagcgtgcaaagaaacgtccacgggcaccgaagcagagttcagctgggtggaacggatcttctaccgtaccataaggagaggatttgctgacgaagccacggggagacgtcggagaatattgtccttttgtcaaaccgtagatgcggttgttcagcaacagaatgttgatatctatattgcgacggatagcatggataaagtggttaccaccgatagccagaccgtcaccgtcacctgaaacctgccaaacgctcaggttaggattggttactttacatccggtagagatggcggcagcacgtccgtggatagtctgcatcgcatacgtattcatataataaggtagacggctagagcaaccgatacccgaaataacggcagtttcccaaggcttaacaccgatttctgccaacgctttgtgcagtgagttcaagaagaagtggtcaccgcaacccggacaccaacgaggttgtccttttttgaaatctttagctgtatattcgctcatgatgttcttaagttttaagttgataagttttttagtagctacgagttacgagctacaagctacaagtctgttcagggcagtacttgttactcgtagcctgtagcttgtcacttcttcagtatctcggtgaaggcagccaccaattcgcttactacgaacggctgtcccttgacttcattgaattgatacggagtgaaattatctaccttcatgcggagataaccggcaaattgtcccagattctgttcggcaactaccactttcttatatttcttcaatacctcagccgtatttttaggcagtgggttgatataagagaagtgagctaaggctactttttgtccggctttgttcatctcttccatagcagaatacaagtgtccgtaagtaccgccaaaacctacaatcagcaggtctgcatcatctgcacagccttgtacttctacatcgggcacagcaatctttgcaactttttctgcacgcaggtggcacattagattgtggttttcaggatcggtagagatcgcaccagtgttgctgtctttttccagaccaccgaggatatgagtatagccttcttgtcccggaatggcccagtaacgtacctggttctcagggttgcgtttataaggagtatagttatccttcatctcaggagtaacatactgaggtttgatttcaggatatgtatccagattcggcagtttccatgaaccggaaccgttggctacgaaaccgtctgtcaacagaaccaccggagtcatgtgctccaaagccattttacaagctgcataggctgcatcgaagcagtttgtcggtgaggtggcggcaataaccggcatcgggctttcgccgttacggccaaacaaagcctgcaataagtcagtttgttccgatttagtcggcaaacctgtggaagggccaccgcgctgtacgttcagaacaaccagaggaagttctgtaatcactgccaggttcatagcctctgatttcaggcagacacccggaccggaagtggtagttacagccaatgcacctgcaaaagatgcaccgatagctgtagcacagccggaaatctcatcttcgcattgaacggtaatgacacctaaagatttatgtttggaaagttcatgtaatacgtccgtagcaggagtgatgggataagaacccaggaacaacttcagacctgctttttcagcagcagcaatgaaaccgtaggctgtagctttgttacccatgatatccatgtatattccgggtgtttttatcttactttctatcttataagtatgcgctacagaagcatgtgtattgtgaccatagtcgtagccggcgtgaatcaccttgatgttggcttctgctatttccggcttttttgcaaatttctctctaaggaaatcttctgcaatcttcaggtcacgattgaacagccagcatactaaaccgagagcgaacatgttgcggcatttcagcattgctttgttgtccatacctgtttctgccaggcaatctttcaccatttgagagataggagcagcaatcacgtcttgcttgatacccatttcttcgataggattgtcagtcttgaaagcggctttctgtaaatcggaagcctggaaacagtctgtgtcgatgatgatacaagcagtagacttagcaaacttatactgtgttttcaatgcggcagcgttcatagctaccaatacgtcacatttatcacccggggtgaatactttgctggcgccgatgtgtacctggaaacctgatacgccggtcagagaaccttgcggggcgcggatatctgcgggatagtcggggaaagtactgatgtcatttcccaccgtagccgatactgttgaaaagatgttgccggcgagctgcataccatcgccggagtctccggaaaagcggactaccacttgatccagttcttttaccatcatgtcgtttgccataatttcgtattactatgattaatttataggatcacttaaaatctgttcttatgttggttggggtacttacaaaaagtactacgcttttaaagatgcgtttgcaaatgtcggaaagttatgcgacttggcaaaatcttttcgagttaatctgtgattgtgtactaaaagaattgataaatgagtgttttttgatatttggagtgagcaaaactctgactatgtgtctgacttgaacgaataaaagttgcatattatcatttatttttggttgcctaactgttgactaaatgtaagattgaatcgccaatatactactgtttgtagctgatttaggttgacactttgataaaatcttgtgtagactgtatttctttaacttctcgataaaagattcgttcgcctttgttaaatcgggagaatgctttatctttgcaaccgcaaatgtttttggtcctgtagttcaacggatagaatagaagtttcctaaactttagataggggttcgattcccctcgggactacaaaacaaaaaagggaagccatttattcggcttccctttttgttttgttactatatagttcttatttagctacttcaacagcaggctcaacaatctttttgttcttcatcatcatatatgcgataggagatgcaatgaacagagaagataatgtaccgattacaacaccgagaatcattgcaaatgcgaaactgcgaatagaatcaccaccaaggatgaagatacacagcagcacgattaatgtactcaatgaagtatttatagtacgtgccagagtcgtattcaacgaatcattgaacaattgctttctgtcacgtttcgggtacaggccgaagaattcacgtacacggtcgaagattaccactttgtcattgatagagtaaccgatagccgtaaggatagcaccgataaatgtctggtcaatttcaagagagaacggcatccaaccccagcacaatgaataagcgccaagaatcattaatgtatcactggtcagtgcagctacggaacccacactatatgcaatgttgcggaaacggatcaagatgtagagaccgatggcgataagagcgagaactacagaccacatggccgaagtcttgatatcatctgcgatactcggacctactttctgtgagctgacgatactgccacctgtgtgattttcacggtcgatgaatgtctccagcgtgatgttctgcgtcaataccggtttcagcgtttcatacagatatgcttcgatttctgaatcgacattgttaccttcttcttcgatacggtagtttgtactgatacgtacagtcttcttatcggtaccaatagcaattacacttacattagaatcaccgaacttactggcgattaactcacgtacttgttccggttctacggcgttttcaaactgtaccttgaagttgcgtccaccggtgaagtcgatactctggctcaagccacgtacgaacaatgaaccgatacagataacaaggataatgcctgtaattgtaaaccattgcttatttctacccatgaagtcgaaatgtacattcgtcatcaggttcttagaaatcttggaagagaaagtcaggttcagccatttatctttattcatgaagtattcatataccagacgtgtcatgaacacagcggtaaagaatgaaatcaagataccgataatcaaggtcgtggcaaaaccacggataggacctgtaccgaagttaaacaggataacacccgtgatgatagacgttaaatttgagtcgaagatagcggagaatgcattagaataaccgtctgcgagggcttttttcacacccttacctgcgcgtaactcttcttttgtacgttcatagatcaacacgttcgcatccacagccatacccagagctaacaccataccggcaataccggacattgtcagggccgcctggaaggatgaaaggatacccattgtaaagaacatgttcagtaccaatgcgccgttggcaaccatacccggaatgaaaccgtacatggagcacatataaatcatcaatagtatcaatgctacgatgaatgagaatacaccggcgttgatagaagcctgtcccaaagacggacctacgatatcttcctgaacgatacgtgcgggagccggcatcttaccggatttcagtacgtttgctaagtcctttgcctgttcgggagtaaagtgacccgtgatttgtgagttaccacctgtaatttcagtatttacattcggtgcagaatatacatagccgtccaatacgatagcgatgctcttaccaatgttttgtttagtcaactgtgcccagcggcgtgaaccgtctgtattcattgacatacttacggcaggtttaccaaactgatcgtattcatctttagcgcttacaacaacatcaccttccagcggagcgcgtccgttacgttcggttgagcggatagcgtaaagttcgaaagtttgtcctttcggatcatattcgtaagcggaaacaccccatttcagacgaaggtctttcgggagttcggcttgaatttctttcatggaaagatatttgttgatgtcggcagtatccttgtaattagcataagctacaacaggaccttgtccgctggaattaacctgcagtacagccagcaacggatgttctttcttgatttgtgcaagatcgacggattgtgctttgttttcacctttcaatgcagcggcaagactgtcggcggtgctggtagcttgcgctacaaccggagcagcggtgctgtcaacagctacactgtcagcaggtgcttcattggctaaaatgctacgcagtttgttatcagctgcttgcagataaggtgcaacatcctttgcgttgtatgtttcccaaaactccagattagcagaaccttgaagtaattttcttacacgttccggttccttgatacccggaagctccaccatgatacgtcccatcttgtcttccagactttggatgttgggctgaaccacaccaaaacggtcgatacgagtacggagtacgttgtatgagttgtcaacggcggcttttacttccgtgcgcagtactttttctacttccgcgtcggaggtcttttgattaactttgtcttttaactgttgagtggcgaaaagctcggaaagacgtgcgtccggagcaattttgtgatactctctcacaaacaacgtaatgacgtcgtcctggctgctaatagcctgtttggcagcatttgccaatgcttgattgaatgcttcgtcgggtttgttgtccgccaatgctttgattacatcgggaacggaaacttcgaggatgacgttcataccaccctttaagtccaaacctaaactgatttccatctctcggcactgtttcagtgtccaattgccgaagaatactttctcattagccagagaatccaggtagtcctgctctactttcacatcgccttttgcaaactctttagccttattggtataatggcgagtcacaaaagaaaaggagagatagaacacacacaccagtgtgagcaataccgcaaaaacctttacaaatcctttgttttgcatgttacttttagtttattatgattacttttttaattaatttctgttgcgtacaaggctgcaaatatagtttttttttcacattcggaagtaaaaggaactcaaatatttgcacatgataaagaattaactccctccgtataggaatgtttttacttcattccgcgattttttaacatcggttccagttgtggctccgttccgcggaagttcttgtaaagagtcatcggatcttcgctgttgcccttttccaaaacgttattccggaagaggtcggctgtctttttgtcaaagatgccgtgttccttgaaagcttcgaaagcatcgttgtccaatacatttgcccacaaatagctgtaatagccggcagcataaccgccaatgatatggttgaagtaggtggtacgatagcgtggagctatttccggaataagccccagtttgtccatggcctctttctcatatgccaatacgtccaggtgctgggtatctgtcaggttgtgcagattcatatccagaatggcagcagccagtaattcggtggtcatgaaaccttggttgaaggttttctgattcagaatcttttcaataaggctgtcggggatagtttcaccagtttgataatgtttggcatacattttcaatacttcaggttcggtagcccaatgctcattgatttgcgaaggtaactcaacgaagtcgcgtgctacgtttgtgccggaaatacctttatagttgcattttgtcagcaatccgtgcagggcatggccaaattcatggaacagtgtttccacttcgtcaatagtcagcaatgaaggcatatcgcctacgggctgtgtgaagctgcatacattgcataccaacgggcggatggcaccttgttgttcgcgatagttgctcatccatgcaccgccgctcttgcccggacgggggaaataatctacgtaaaaaacacccaagtgtgagccatctgcatctttcacttcgaaaacttctacatcagggtgatatacggggataccttccaatttcgttaaagtgatgccataaagcttattagctacagcgaaagcgccttcgcgtacattttctaacttaaagtaaggtttgatttcgtcttcttccagattgtatttctctttgcggagtttttctgtatagaaccaccagtcccacgcttccagtttttcacctttgccttctttatccattattttctgcaattcaacagcttcggcttttgcttttggcaatgaatagctccacaggttgtttaagaagtccataacggctgtggaatttttggccatcgtattatccaaaacaaaattggaataacagtcgaagcccagtaattgcgctttttccagacgcagttttacgatgtctgtaatattcttcttgttgtcgttcttgtcattgttgttgccgcggttgatgtaggccttgtacatttgttcgcgtaacggacgattttcagagtattgcaggaatggaagacgactggcattacccaatgtgaacagccatttgccttcttgtccgtcttcttttgctttttcagcggcgctttgacggaaccagtcgggcagtccggctagattttcttccttgtctatataaagtttgaaggcgttgttctcattcagcacgttatcactgaatttgatacctaatgtagacagttctttgttgacttcgcgcaagcgtgcctgtttctcaggggataagtttgcaccggaacggacaaaacctttgtaggtttcttccagcaggcgttgttgttcggtagtcagtcccaatgcatctttctgttggtatacagcatcaaccttcttgaaaagatcctgatttagtgagatattatcactgtgttcggacaatgtcggggcgagtttaatagataattctttcagatcatctgttgtttctgcttccgtcatgttataaaagatggcgctaacccggtccagtatcggggaactattgtcaagagcaacaattacattttcaaaggttggcgcttcggagttgttcactattgcattgatatttgcattttgctcttcaatgcctttcagaaaggcaggttcataatgttccagtttgattttatcgaaaggcggtacgccatgttcggtttggaactcagtcaggaacggattagtttccgtctgtgtggtacaggagtacatcatacaacttgtagctaaaataaaaatacacttcttaaacataagttttaagtattaggtataaagtattaattattgattcgttttcaatcttttttcttcagataacaccagattggataatggtcggattcttttatagaacggtccaccgtacagttataaggtttaaggtttttgcttgccaggatattgtctatccggaaatagaatttattttgattataagagatacccagcccgcggccggacttggtaaaagcatcatttaatcctttttcaatgacccggtgtgcataggaaatgggagtatcgttaaagtcgccgcagacaatgatataagggtatcgtgacgctgcgatttcctgagcgatactgtctgcttgtggggcacgaatggcggatgcttctgccagcttgcggatgagcaggcgtgcaccgcttttaactttttctgtttcaggagatttgagcatactttcgtagactactttgtcttctttagtcagcttgttagattccagatgattgttgatgagcattacggtatcttctcccattttcagttcataaaccactgaaccattgtattcactggcatagtccagtgtacgggatgaaagaatagggaatttagagtagcaggctatccggttggtgtggccttttccacttcctcttcccactatctggatgttatgatagggataatcttttaaagccttttccacatctttctggctgagataacggggagattctatcgtttggtattcttgcaggcataagatatctgctccgctgttcttcagataattcagaatgagattctcgccatcttttttgacggctccgtcgaagcccatgatgttatatgacaaaaccttgaaactgttttcgggtaatttgcttgtgtggaaattgagcgggaaataagtccgtatttgtgaatagcataaaagaaatgctaccagtggaaaaagtgcaaacttatacttttggataataagccaaaagatgaaaaagcagatgtttatcaccaggaaaataggaaatgtcagcccgaagcaggattctacggggtgaacaaccggcttgatgtgcgggctgtaagcggtgagaagcagcaagcttataaagaaaatattaaccgctaaaatcagataggctacgaatttaccaatatgctttattcccattttctgtactatcgtttgctcgcatcgaaaagacttttcttttcttctgtggtcaggctttcatatcctgattttttcagtttatcgaggatacggtctatttcttcggattgagatttcttgcgggcgttgtagtcatagtctttctgacggctgttaccatagtgaactttcatcttcggtttgcggggcttgaagctgaacagtgaaacgatagcatctagaattttgttaatccaggcagtgatatcttttcctttactgagtccggcagcaaaccagagtccggccaatgcaccacccaagtgggcaatatgtccgcctgcattgctggatgtaatgaacagtaaatccgtaccgatgacaatcagtgccagatatttcaaccgtatcgtaccaaagaggaacagccggatggggtagttaggttcgcggtatgctgtagcagctacgatggcaagcacggaagcggatgcccccaacatgaatgaataatcgaccatcgggcggaaatacgggaagatattaaaggctgccatgtacaataatccaccgcaaatacctcctaagatatacgccccgcgcagatgtttggccgagaagaacattaggaatagtgctccgaaccagtatagccacaacatgttgaacaggatatgtaaaaatcctgcatgcataaacatatatgtaaacagtgaccatggctgtatgatgaactgtgtgagtgaagctggcaattccagccattcaaacacaccgccgaggctgcgattgaataattgcagaattacctctgtcagcgtagtgactacaaaaacagctacgttgatataaatcagctggatataaatattccctctgcgaaaagcctctttaaggtcagttataatagtacccatttcctctatctttttttctccagtacattatcagtataaaaccgaatatcataccacctaagtgtgcgaagtgcgctacattgtcgttaggattgttggcaaaaccagcgtacagttcaatcagtgcatatccgataacaaagtatttggcttttatcggaaacggcaacggaaatatgaatagcggctggttggggaacagcattccgaagcccagcaaaatggcatacacggctcctgaagctcctacggtaactccgtttaagagagcattcagatttgccatgggcggataggtgtaattcatattatcccgtatgatttgagcgccttcctgatatacggtgttaatcatttccggactcattccggtctttgcagcctgaatgcgtatgtaggttaccagcatgctgattaagcctgcacctataccacatatcatatagtaagataaaaaacgtttgggtccccatacttgttcgagtatgcgaccaaacatccacacggcaaacatgttaaagaaaagatgtgtgaaacctccatgcatgaacatgtatgtgataagttgcgctacgttaaagtcatcggcaagaaagaaatgaagtcccagataacgggctaaatcaagatgataactttgagcaacaatggtcgcaagaaagaccagtacattaatgattaataggttcttagtaactgttggtatagcattcataatctgttatttcgttcaatgagtcgcaaaaatacgaataaattctgttctataacagaaaaaggcctttctattctttatttttcgccaaaatccaatctttttttaatgtttttatttgatattcagaaatattgctctatttttgtagaggtttgtgaatgactaatgcggatatcttttgtgtaacatattaattatttaattttagtattatgaataagtcagaacttatcaacgctatggcggcagagtccggtttgacaaaaacggattctaagaaagcattagatgctttcatggcagcaatcacgaaagccctaaaggctggtgacaaagtatcattggttggcttcggtacgttcgttgtagcagagagagcagcacgtctgggcattaatccttctaccaaacagagcattacgattcctgcaaagagagttgctaagtttaaacctggtatggagttgactttggccatcgaataaaggaaggctatgaatgaaaaatagaaaaggaggcgctatgaggtgtctccttttttattatccgtacagatgcaacgcgtaattcgccaaaatatagtatctttgcacccggaaaatacttttaaatcatgaatatagaagataaactggtagcgtccgtcatcaacggactgaaagcgctgtatggacaggacgtgcctgccgcacaggtgcaactgcaaaaaaccaagaaagaatttgagggacacctcacgctggtagtttttcctttcctgcgcatgtcgaagaaaggaccggagcagacagcacaggagattggcgaatacctgaaagctaacgagccttcgatagctgcattcaatgtgatcaaaggtttcctgaacctgactatcgcttcttccgcctggattgaattgttgaatgacattcatgttgataagcaatacggtattgttgctgccacggataattctccgttggtgatgatcgaatactcttcacccaataccaacaaaccacttcacctgggacatgtacgtaataatcttctgggtaatgctttagccaacattgtgatggcaaatggcaataaagtggtaaaaacaaatattgtcaacgatcgtggtattcatatttgtaagtccatgctggcctggtccaaatatggtaacggtgaaacacccgaatcatccggaaagaagggggaccacttggtaggcgattattacgtagcttttgataagcactataaagctgaagtgaaggaattgatggctaaatttcagtctgaaggtgcgacggaagaagaagctaaagcaaaggctgaagccgcttctcctctaatgaatgaagcccgcgaaatgctggtgaagtgggaagctaatgatccggaagtgcgtgcgctttgggctaaaatgaacaactgggtgtatgaaggttttgatgaaacttaccgtaaaatgggtgtaagttttgacaaaatatattacgaatcaaatacctatcttgaagggaaagagaaggtgatggaaggtcttgaaaaggggttcttctataaaaaagaagatggttccgtatgggctgaccttactgctgaaggtttggatcataagttgttactacgtgctgacgggacttctgtttatatgactcaggatataggtacagctaaattacgttttgctgattatcctattgacaagatgatttatgtagtaggcaacgaacagaactatcatttccaggtgctttccattctgcttgacaagcttggatttgagtggggaaagagtctcgtacatttctcttatggtatggtggaattgcccgaaggtaagatgaaaagccgcgaaggcacagtggtagatgctgatgatttgatggaagaaatgattagtactgccaaagaaacttctaatgaattgggcaagctggatggcttgtctcaggaagaagctgacaatatcgctcgtattgttggtttgggcgccttgaaatatttcatcctcaaggtagatgcccgtaagaatatgacgttcaatccgaaagagtcaattgactttaatggaaatacaggtccgttcattcaatatacgtatgcgcgtattcaatctgtaatgcgtaaggctgctgaagccggtattgtaattccggctgaaattcctgttggtattgagttgagtgaaaaagaagaaggccttattcagatggtagccgactttgctgctgtagtgaagcaggcaggtacggattacagtccctctattattgccaactatacttatgacctggtgaaagaatacaatcagttctatcatgattttagtattctgcgtgaagagaatgaggctgtgaaagttttccgtctcgctttgtcggaaaacgtagcgaaggtagttcgcatcagcatgggcttgctgggtattgaagtgccggatagaatgtaaaaacagctatctataaaaataatcagccccggaatgtattggtcattccggggctgattgctttataatccttttatgctttcttcttggtatattttcctcgtttcggtttagctggagctgatgcagctttctcgctctgcaatttgatgatttccatgcaggcgtccaagtttaaatcttccggaacgatatcctttgggattttgtaattactgcctttataagcaatgtaagggccatatcttccgttcatgatttccaactcaggttcttcatcgaacttcttgaggtgcttctttgcttctgcttccgctttttcttttattaattccaaagcctcttccaattctatttccatcggatctacgcctttgggaagtgaagtataagttccgctgtaataaatgtacggcccgaaacgcccggcattgacagtaaccgttttgccttcatgctcaccaagggtacgaggtaacttaaacagctccattgcttcctctaaagtgattgtttcgatggattgacctttctttaaaggagagaagcggggtttttcttcatcttcagcacttccaatttgtactacagggccaaaacgtccgattttgacgcttacaggcttgccgctaacagggtcatctcccaatatgcgttctccagtcttgtgtgcatttttggcagcgagagtactttccacggatggatggaaggttttatagaacgtcttcatgatagtcgtccattttgtatctccctcggcaatctcatcaaattgcttttctacactggctgtgaagttgtaatccatgatgctggggaagtactgtgtcaggaagtcagtcactactgtacctgtatctgtaggtagcagttttgctttttctgctccggtgatctcagtacgggtggcatctgtgattttgtctttcttcagagtaattacattgtatgaacgttcctcacctgttttatctcctttttctacgtactcacgttgttgaacggtagagatcgtaggcgcataagtagagggacgacctatccctaattcctccagtttgcgcaccaagcttgcttctgtatagcggggtggatgttgtgtaaagcgttcagtggcagtaatgttctgatactctaacttctgacctttctttaacggtggcagcagatgagtttcatcttcctgttccacatcgtcatcataagattctctgtatacacgcaggaaaccgtcgaatttcacaacttctcccgtggcactgaaagcctcggatgtattgcttatactgatggtcgctgttgtcttttccagttcggcatctgccatttgagaagcaatggtacgtttccagatcaggtcgtatagtttcttttcttgtgcactaccttctatctgtgcattttccatatatgtgggacggatagcctcatgcgcttcttgtgctcctttggtcttggtgctgaagtggcgtggatgtacatatttgtttcccatcatattggtaatggcttctttgctgccgttgatggcgagttccgataagtttacggagtcggtacgcatataagtaatacgtcctgattcatacaaccgttgagctaccatcatcgtttgtgctacagtgaagccgagtttgcgtgcggcttcctgttgcaaagtagaagtagtgaacggtgcagccgggctcttctttaccggacgtgtcgtaatatcttcaatggtaaatattgccgattggcagctttccaggagcttctgcgcctcagctttggtcttaaggcgatgtgcaagttccgccttcatctcaacgagttttccgtcagtatcgggaacaaggaaaacagcggtgactttataagatgcttcactttggaaagcatgtatttcacgttcacgctctacaatgagccgtacggctacggattgtacacgtccggcagagagtgcgggtttcacttttttccataatacgggagaaagttcaaaacctacaatacggtcaagaatgcggcgtgcctgctgggcattgacaagattgatatcaatattgcgtggttgctcgatagctttcagtatagcggttttggtgatttcatggaatacgatacgtttggtatgttccggttccagttttagtacttcatacaagtgccaggcgatggcttctccctcgcggtcctcatcggaagccaaccatacggtatcagcatctttagcttcagctttcagtgtcttaaccagtgctttcttatcttccggaatttcatagtccggttcaaagtttttttcaacgtcaatgctgaattctttcttcttcaagtcgcgtatatgaccatagctggaaagaactttaaaatcttttcccaggaacttttcaattgtttttgcttttgccggtgactcgacaatgacaaggttttttggcataaatttctgttttatagtggctcctgccactgaatttgcccgcaaaagtagaaaaaaacaattgtttccaccttataatatgtggagaatatattcttttttagcaaaaatgactttttttgccacgcaatttgttaaaaacgaaaactcactccacccatgaaattgataccttctgtgggatatcccgggtaatattggtagtctttgttcaataaattgtttgcacggacatagattgatatgccttcaaagacttcgtagctaccgccaaggtatagattcccaaccggatctacacgctcgttgcctatcttctcacgagtgatgtgctgataaccgaggttgatcaggacagaagaaaccggacgaatgtctaccttgaaatttgcttcgaaagaaggcatgtaatagagtagctggtctccgctgttattttctgtcttagcagttttccagtcacggtaaatgcccgaagcggtgaaggaaataatatccttatagctgtagctggcttcggcgcctgcatatatgttatgcatatttccttggagcaattgaaggtatgaaccgctatagttcgcaattgcggcagaagcaagattattctttaaatcctgatatccaccataaatattaaaccataaacctgttaccggactggttttgaagccgagagcggcattcagctgttcgtaggtggcatccagttgtgtactactctggccataaggtgaaaccatttctagcctgcggaaatcattggcctgccgtccgcctgtagcttgggcgtagagaatgtaactgtcagagaagatatattgggctgtcacgtccggtgctacccggaatttcttgccaaacccgaatgcaaaatccacgtgagcgccgagacggattttccagtcttcgctctgatacagataatagggatttaattccacagaggtataatcttcaaaaagattgttcttgtagaacgtattgtccatggagagatctactccaacaaactgctcttcagagatcgttcccattgcaccggcttttgtccgtaccataacttcctgtgcgtcctgatattgtatatcgtgttggcgctcatagaacatcaggttggtttcggcatgaaattgaagcggtaattcttcgctggttgattttattccgaaatgtacatcacccgacaggaatttctgcttattatttgtgctgccgggcatgaagttgaagttgcttagcccgaagtttccggctacatttaagtccattttccggaaagcatgtacataatccatgcccgcatgtgtacggtaataacgtgcatcccatttatccttggaatcaggcagatctaacttgccatccatgccgttcatgtggaaattcaagttcagtttgtcactgttaggcaggatgaacagataattggcacgagcgtccaggttgccgtagttgccatatcccagacgggcgtagccgcgtttggctttatcctggctttcagctcctgtatacgcctccatggtagttgcaggaatatttcccgcaggtgcgagtgtggcatcatattccacagtctttttgctgactgttggcggcattaccttgggcagtacgtttactttggaagcatctatgatgtccggattatattcttgttctaccacgaccgtgcggctcagggtagtatctttagcttgcgtttgggcttgcacccagttcggtatggttataagtgccaatgccccgaatatatattgtacctttttcatatttataattgacgaggtttttacttcagtttttctaatctttcattaatcatctgttcgatgtcatcgtcggcatggtaattctgttgcaggctcagcaagtattggcgtgcatccagttttttatccattgctacatatacatccgacagcagaacgaaacttcttgccagccagtaagcgtgtggtgtgctctgatcaatgaagttgagtatttccttttcagcagcagtgtattcacctgccttatacagttgttgagcaaccaggtatttggcttcggccccataaagtgtgcgtgtatccttagccagtgtctgaaggtcgttcatggctttcttgtcggcgcgttggttcagataggccttggcacggaaatacagggcttcgttgcgtagctccggtgtcaatttggtttcggcaagcaggtcggtggcagcagcgattgtttccacgtcatcctgcatcagggcggcactgcgcagcattcctgtttctgcaagttggcggcgttcgggagtggtagcttttgctttcaactgtctgtagtcattcaatgcctggtcgaactgcttacggttgaacagaatttccgcacgtgcaatgagtgcttcctgtgaataaggattatccggatattccagcagtttgccggcatgttccaatacggcggcttcatctttctgttctttgccaatcacacaaagatagtaatgggcgttcaggctgaatgcgccgttggggaagctttgcaggtaacgggtaaagcttgatttggcaggagcgatctctctcttcatatataccttttctgcggcgatataagtcagagaatcctgctcgctggcatcaaagcggatttctcccggcatcttggctgccagggcggcaaattcatctacacggttagcatctacatagatcgatttcaagtcacgcatggcgagacgtgcttcttcactacccggatactgggttactacatgcttgtaagcatctatcgcgcgatcatattcatcgttttggtaataaagcaggccgatttcagcagcggctttacggctgaccgggctttcgggatatttatccagcaattctttaaatgctgcgatagcctggcgactgttgcttgtctgtacatatgaacggcctttttcgtaaagagcatttatggtatagggtgaagacggatatttgtttgccatgcggttgagcaatgcaaccttaccatcataatctttctgcaagccggcaaccaaagccagctgatagaaagaataatcacctgcaggagttcccatattttctgctttggtataatattgcttggcttcatcgaaacggcgtacgtgcagataacagtcgcctatgcgattgtaagcatctgcgagtgcagtgggattttctcctttttccagttgtgtgaatttcaggaaacggttctgggcaagtgtgtaatctttctcatgaaaagctatgtaggccagattatagtatgccagtgcataagtttctgtatttctgtccggagtaagattcagatattcactgaagttacttgctgcttcctgcatccggttcagacgataataagcttctcctctccaataaatagcatccgccttgttttgcagattatattgtcccaaggctacagactggttaaagtaaccgatagcttcctggaattgtgcattggcaaaagactgtgtaccgagatggaacaagattttctgtttcgcttccagaattgcagtgcccgggtgagcgattcgttcgatggatttcaaggcggcttcgtaactgcgggtattcatgtatacctctaccagataactgctgactttgtctacatattgggaattcgggaattcattaaggaatttctcgaaaacagtaacagattcaccgaaagcggaataggaggtctcgtgaatacaaagggcgtaattgtaagcagcctgctctttgacttgcatatctgcattggaggcagcagcttgctcaaatgccatgcgtgccttgttcttatctgacatttgcagataagccaaccccatgtgcagataggcattttgtgccagtgcgtcattttcagcggttacttcgccgagggtattggccgctttggaatatacaccgcagttgtagtacgaaagtcccagcatatagagtgcatcccgacggggggcagcctctttattattttccagatacttttcaaatgcttccatggcttcgtgatactttccgaaatgatagtcggcatcaccgagaacacggtacatttcagctgtatattcattattcgggtaggcggacagataattctgcgctactatttccgctttatcataattctttttaatcaggtaaatctctgcgatataataaggcgcaagcgctttgtatttggcgttatcctgtaaagacaggaagccggtcattgcttcgtcataacgttgctgggtgtagcggatataagaaatgtagtatgtgcaatcggctgcatactttttactggtgctacggagagtttcgaaccatatggcagcttctttcacattacctgttttcaaatagcaggttgccagacggtatgtcatatcgtcgcgttcttcatttcccaacagatcgagacgggcagaattgaacatagccatggcttcatcatattttccttcgaagaaatatgcggatgccataagtgcataaatgcgattggcatagggtgtatcaggatattcatccagataggcctgcaatttgtctaaacttttaaggtcttttagttcgtaggcagcacataccagcatatactcggcttccatccgttcgcctgcgacaggcaggggcttgccttctgcatctatctggcgtacaaatgcttgcaacggtgggatggcagctgcatacgctttttgttggaacagtgactgtccttcctggtaaagtcgttgaggggaagtgatattctcgctggtctgtgccgtagcgagcaaaggtgcacagcagagtgccgtgcatagtattcgggagagtttattcttcataatgcaacgcgtttttacaaaagtacgggttttaagtcgaatttgttacacttgtttggcttttttaggatataccgtggtctgtgcgaatcattattcgcccatttctttcagaaatattcctacccctttgcggatggaactcagtccgaaatcttctgtatgtatatctttcagtggcagaaagaagacgtctgcggcatcatccattgcttggtaatgcaaggtgtcagttactgtacagcggaagaataaatccagagtatggacggtgaaaccggaatacacatatatattgggcaaagagaataaatattccgcctttttcacttccattccggtttcttcttttacttcgcggctgactccctcttctccggtttccgccatgtcgataaagccacccggcaaatccagagttcctttagccggatccttggcacggcggcatactaataattcgttccgttcattcattatcagtgccacggtggcggcagacgggttgaagtaatagacgaattcacagtcggcacaacgtttggacttttcattgttgatttcaaaatgcacggagccacacttggggcagtatttgaattgagaaaaaggatgttccataaatggttgaatattaggttttaaaattatgtatccagcagccatttccagatggggataacttttatctccatgccgtttttttgaatagtctcctcttcatcgtaggtgatgacgagtaacgtctctaccgcttgtgtttctgctattttcaataaagcgtctgtttctcttttacgggtggattcttcttttaggctataggatacttgtacggccaattttgcagtagggatgtaaaagtctacttctatattttgttgataaaaatagagttcctcttcatatttcttttttaatgagatggcaactatattttccaataacgaggtcaccgggtctattaggaataagttcagcagcccattgtcgatgaaataatatttccggttcgatattttctctactaatttgctggcatagttttcaagtgagaagaatagccatgtggcttgcaagaaattaaggtaatcgataatggtgtccgttgaaactttggcgcctgttgttgaaacgatattggtcagacggttgaaagaagaaggttgtttcacactttcagccagtttacgaatcaagactttcatagcgaggtcattgcgaatggaataacgggttatcaggtcaccgaagaaaatcttattgaatagattactgagccattgccgtttttctattgtttctatgagcattaattcgggtagacctccataactgaaatagtcggagaatgtccggactatctctgtacggtttttgtaataccatgttggtccaatctcaattttagaagctttcagaaattcagagaaggagaaaggatatacattttgtactatatatcgccctcccagtgtagtagcaatttcggcactcagcattttggcattgctgccggtaatataaacgcgatactgttggtcggccagacggcgtgcaaatttctcccaatgctccacaatctgtatttcatccagaaaaaagataggtttatgcggataaagttcttcgtaagaaactttgataaggtccaaatcttctacagtcaaattgaccaggcgatcgtcttcaaagttgaaatagagaatttcttccggttgatgtccatcattcaacaagctttgtatttgttggtacatcagataggatttcccggctcgtcggagtcccacgaagacatagttcaactgatgagatagatgtatttcacgctctattaatgtaatattagcgacaaattgctgatattcaatgattaaacgtttgatggtgtctttgtccatatctctttttgtaattgatgacaggcaaatatacgaatagttatcgaatatattcgataaaatgaatatgttattatcgaatatactcgataataaaggtcctatcactcattcatcatggtgtaggacctttctctaaattaacaaacaatttacttattgaaccagaatcttttttcttgccagcagatagatgccttttcccaatccggtgacagcagtggtgccttcttgtacttcaacctgacgtaccatgtgtccggctgtatcgtaaatggaaagtgtacgctcgcggtcgctcttgatgtaaagaacaccatatcggacatagatttctatgccgtccaatgcgtcggacggtaattcttctatgccggtgatttctcctcctattcctccgatactgtaaagctttggtgcattgactgccgcctctttactaatcagataagcttcgaagggttgcacatcgcgcaagttacggacgaatgcgccacccggggcgatattctcatacgtagccgggttaatggcatataccgtatcgtgtttgaatacagtttcgtaggcgggaatcattattcgattacttccttctatacgggcgagttctttataagaagtagctttaacctctacgccgccggcatcttcggcatggaactgtacttctccgctgatgttgaattcgtcttcatacgactcgctgtttggcagtgagatgatgtagggcttgtttgctttcatggcagtggtatgttcaaagccatcggttgtcatctgagccagccagaaaggtttggctcctttctttccgctgttgaaaggtgccagttctccttgcttctcgttgctgaaactttgtacatcaaatggcagtacgattgcttcccatccggcggcattgattttgttaccggacttcatgctgaagttacgtttgtaggtaatgtcttttgctttgaatgcctgtggagagcggaaacctttgccatgagtcaaagaaatcttttctgccatgccgttaattactacgttgccttcataagtacatccggttccttcgggagcgaagatcaacaaattccccatcttggcaggcgtatcaaagctttcggcggtgatggcggcttgtgcattccagtttatcagtagtaattggttgcagttattgaacgcggatttccctacagacctcacactggcagggatttctatttcagtcagtccggtgcaactatttaaagcagctgcggcaatctctgtcgtatggttggagagtgcaagatgtgtcagattgggcaagttatagaacatatagtctcctgtgacatcatcggcagtgaggtagttttcgtagtatttgtcccctccttccactatacgtgcttcgctgatgtcgagccgttgcaggttcttcaggctgcggatgaacttgatgtccgttccgttgaggtagccggtaagtgccagattgacgacggcctccggatcgcttaccagttcgggcaacgttcccgcaacctctacagagagagcgttgctttgttggcttgtgatggcaatgaggcttaatgtttccgatggataggaagcatccttcattgctgtatgcacaaatacatagtaggtacctttggtggcgatttctgtttttatgccctttgccagatctgttcctttcaggcatgtcatccatttaccgtcgggggtgaaaatgctggcggaacatggctggtcggttttccagtatacggaattcgcttccggaatctctatgacaaaagcgacccattttccctcgctgggtttggcgaaactttgcggatggttgttctccagcgtggtggcggttgtagtttttcggatgatatgtttgaatgtttcgactatgggctggctccaaatgcctacagtgtctttgaaagacagggcaaaccgtgattcggtaggaacggagattgatagcgtctggtcattattgatgtccagaccaaaactatcgggtacgcttgcaagattcatatctggaatatcgaatatcttttcgctccactccaatggattcactgggtctatgtctaccgtttgaagcgttgccggatcattgttgaagctatattgatattggacaattttgttgctttccgggatgggggtaactaagcggtagaagtaatagctgacggggctactccaaacgccaaagctgtcttgtatgcggaagttgaagtaatgatacccttcgcccagtgcggatacgtccagcgcatttagattgatgactccatcctcggctaattttccggttttcttttcctgatagttgctgtcgagccaatattcgtattccgttaatgtgttcccacttcagtctatgtcggtgcgatagaagtaatagctgacaggagtactccaggcattcatgttatcttgcgcccggaagttgaaatagtggaatccggcaggaagtgcggacacgtctagttccagtgatacttcacctgtatcaccgaatgtgccgcttatttttttctgatagttatcgtttagccaatactcgtatttccggagtgtattgccgctccagtctgtcttctggcggaagaaccaatagcttttcggattgctccataagccgttgccatctttggctcggaagttgaagtagtgcataccctctgcgagcgtactgacatctgtttccaggacaatgtctcccgaggaagtattttcggttatgcgactgtcaaattgattgtcaaaccaatattcatagccggctacactttgtgcttgtgccgtcagggcgcaaagacaaatcattattgataaatatatttttctcatttgtatagcctcttcgattgatgggttatttttgtgcttctactttgatggataccttcaatttgccgtccaatgtagacttgacatcaatttctttagagataatctgcggattagaaggagtttttgtaaatggatagagaccgccatagattcctacgggagttccgtcggttccaatataggttccggctgcttctgctttgatggcatgagtcttgctgggatcatattcatttcctatttcttctccgaagatggcaatgtcgttcttgccggtccagttatctttatcattgctgtagctaacgttgtttaaggcatcaccatatctaaagatattcttttcaaagaaagatgccttgaaagcatcactcccccaagcataagaatccaatataatgttgtccttgtaggtggtaacacatggattatcatagtcaaacaaaatgcagttcttgattaagagcttgttgtcattgtgatatccatataatctgtttatgatactgttgtatatggctatgttgtttgttagatctgtattaatgttcccaatgatgcagtttatgatattaacatcagaaatacaccaggcatcttgtaccatgtttaaacttccgtagaatttacagcgttttagggtcaaatccttcagtgtaacaggtttgccatttttaccaatatttacactttcagtgaaagcgattccttcaatgtgtattccgtcaagatcccctgtcttgtttaccgtttctccctcactattcacctctgtaccgtgctgtatagttatctctccgacatttgtggaatatattcccttactttcatcggtttcgcatcctgcgccatagaccgtgcaggccttgttgaaagtcggtgaattgaatgttccggaagacaatgtgatgacatcggttactccggttacggcattgaaagcactgatgaatgcatctttcccataatagatactggtcttgtcaccttgctgcaaggttgcggactgaagttcggtctgtgcggaggctctgtttcctgaaagaataaaaatgattacagtgaataaaaatgatatctttttcataatctgagttgttaatatgttaatactattttatcgttcttgttcccgggaatgccggatcgtcaatgctcggatctgttttcttcgttctagctgtggcggtggtgctgtaagtcgtcccatttttattgatagcatacgcccggatagaataattggtatatcctgtcagcccggtaagagtcgtactcatatctccgacagttccttccattacaattctcttttcgcattcttccacgctcggtgttccttttgaactatatacaaacccacgttctgtaatttcggctcctccatcggcagaaaccgttgcggatacatccaatgtggatggagacggatttcctgctgccatattcacaatcgttgcttttgccgaacttccggtctttatgataacataagcactatatccaactcctttgccattaacagcgtaggcgcgtacatgataagacgtattataggccaatccggtaagtttggcttggaacactccgtttttcaaggttgctattactttcttgttgcgggtgatgtccggctcagcagacgaactatcccagcagaagccgcattctgttatgctcatgcctccattgtcagccaatcgggctttcatagtggcattgtcgtcatttacttctacttccgttaactcttctaccaccggcttataatgttgtacggtggtgaatgttatggcattgctatatgccgttccgtttttattggtggcataggctcgtgtgtaataagttttaccctcttccagttctgttagggtagcattgatattcatactttctgatttgtcgatgacaagtgaattgtcgatagtgggtgattccgtattcagactgtagcagaacccttttcctagaatatttgtaccaccgtcctttgttattttggcactaagtgctgcgcttgagatatttacgtctcctaaagttatgttgctaatttctgccaaaccggtttgtacagtggtgaattctgccggaccgctataaaatgtaccatctcgtgatatggcataggagcgtacataatagtgttgtccctcaatcaattctttcaatgtaacagagatgctgttaccttccgaagggtcggctatgtgctcatcttcaattgacggctgtagtacggacgtgctgtagcaaatacccttctctaagatactggcaccggcaggtaaattgatagatgaagtaactgtggcatcattgattgtgatgtcgctcactttaggcggacttaaagtcaaggtttgtaccttcggaagagtgaattctttagtatcaccgtaaccgatgcctttttcattaatggcatacgctcgataatagtaagtctttgccggttccagactggaaacggttgccgtaaattcattcccttccagaccggaacgtacacgaggatgatcgattgttggcgtctggctttcggcactgtagcaaaaaccacgttcggttacagtaaaaccattgtcggatagcgaaatagcgtgaagtattgcgctgtatgcagttaggtcacttgcttctccggttgtgagtgagggaacctgtagcttgtctgtggtgacggtgatggatttgctgtatccggttttatggtcattgttggttgcataagcccgtatgatataggctgtctcaggtagtatgttttcttttatcgctcctgtaaagctaccattctctccactgtctcctgccactattgttccgtcagtgatagtgggatcattagtcccttcggtgtatgccttgtatacgaatcctttggttgttatcgtggctccaccttcgtctattactttgccactaattgaaatgctgttttccgttttgctggtaagactgagtgtaaccgatgggatgtccgtcgataatgtcgtgaactctttgattgcgccacgtacggcattatgcccactgcttgattctatactataatagtaagttgttcccggctttagattgttaagtgtaagagtgtattcattctctgccttttttgtgccgggaattgtatctacagcttccaataatttggaagacatagaggaaacgagaaagtaaatgttatgcttctgtccttgaggtgaatcgggatgtggggttaccgtacctgataaaatggcttcaaatcgggtgatgccggatgtttcaccagtgacgggtaccggagcgaagtttatcggttcagtgtctttttcacagcttgccacgaatagcaacaggctgcaccaaatgatatattgtaatcttttcatcgtttaaatggatattagaattaagaattagaaaaagaagccaatgcctgcgctgagttcgtggtatttgaagttgacggtttggaatcccacggataccgcaaattgtcccagtcgtccgatggcgccaagttcagcggctacgcctgtggcggagtggtcggtgttctttaccagttcgccgtctatcgtttcccatgccagaacccggttgccgtatcctgcgccaatgtaggcatatagcggtttgatgatttgacgtaaatagcctgcggtaatagacatgcgtgctttggtagtgacgccttctttataataaggtgtacccgcgccattgctcaatgcccctgtatcatcgcattccagttcggtggatgccgaaccgaagtcgctgcggaagcgtagatacgctccgttcttactgacaatgccgaccatggcgccaaaagaaatctgtgaagggtgatagccgacttccgccattaccagcgtgcgtcgtggctctttaggcttgatggtggacttcattttaaaggtaaggctgctcgtcttgccagcgaaaatagtgacagtactgtccatcgggaagaaaaaatctttttcgatgcgtatccggtactcttgtaatggcattcggtcactcttgtagggtgtctgtccggcaagctcattgtttataaaaactttggcgtcctgttcgggcagggagaatatttccagatatccgaaacggggtttcagtgttacgctcatgatcttctgctcgctacccagatcgataataccggcttcgggagcgtacatgggtgattctaccctgtaggtatgggtgccttttttcatggtagcggtgaacagtccgttttcggtcggtactttttcgtcatcgatataaatatcggcagttgccggatcgggacgcatcacaattagttgggtattcgtgtttgtgggtgtttgctgcgttccgtctcctatttgtatttccatttcatagacagtggctttctcaataatgtcaggatagaaataattgcggagtacgccgaacttatcgtgcataatggaaatacgtcgtgctccgcgaggaatgtacagccagatttctccgggcttgttttcacgggaaacgattccaagtgcatccggttcgaacattaggtctttttcggttgtaacgatgcggattagtgcgcatacttctccgttctgatcacgctgaggagcggtgatccgggcggtgacatctgtttccatccggttgaatgaggtcacctggattttgttttgcgctttcgtagcagttgcaacgaagaacaaacttatcactaaaagtaattttatcgacaagcattttgtgattttcctgtttgtcatagcgtgtttttttgtttcttccgtctatcctctccggcggaggttactatataaaaaagcgtgaggaccgtttctgttcatctatccttaaggttctggaataccttgccccagatgaacaacagccctcacgcctatgttatattatataacgtagacgtgaagaaactgttgctattgctccggggttgaattttccagattctaaggatggaacaataactttcgcttcttgcgttcgtaaactcacattttatagtcttatgcgtcacctatctctataagcagcaagacttggtacaaatgtaggataaattttcttaataaagaactccctttggataattttttattataaatagtggaacttctgttaatgtctgctgtattttttctgtataatctgttatatcgaccacttagtatggatataatgttgtttgtctatgaaatcgtattcggtaatgtccgggtatggtaacttttcccctgaatctgcgctttgatttgtctttctataaatctacttttcttcttacagttctttcagattttcccgaatcgcctcatttgacggctttacggctgaaacttccggtgtatgagctgaatcatccaaaaatcactcagtgatgccatactttatcaatctgacagattgacaaagtgataatcctaatgcgcgagaatgttttcttttaagccctaccggagggaaagaagaaaaaacgcaaggataacgtttggtgaaagtgcacgatgagtattgtctgtaaagaaaaggagtcgcaatgttcttcttatgctctattttattccaaataatcttcatctttgatgtaattgcagcaaaaaggaagatgccgaatgatctggcttcgtattcaaatagacagaataaatcggctttggaggagggctacaccctttttcccggatggtatcacccttttagcaagatgactacaccttttgcaccgaatagtgtagccatcttgtaaattacatcgttagttttactccattacattattagttttatctaattacatagttagttttgcccaattacatcattagttttaggcaaacagatggtctatttcaaggaaaatgaggattcattgtgctggaagagtctttttaattcaagcgtgtgttagcggaattcgcataatgacatctttatgcttgtgaaatagggatattagtgtcattgttcttgttcgttaactatgggcatgttgcgcctatatatcggacgtgttacatctatatatcgtgcatgttgcatctatatatcggacgcgtcgcatctatatatccaacggtacccatatatagatgctaaaaggtaaggggctccgcgatggcatcttgtgttttgctgcattgaattacttcattatggctaaactttcagatagaagtatcgtgtcaggacgacgtgcgtagtgcaagcaaaattgcttgcacttaaataaaagttgctgccaccactgatttttggctgtttatcagttgcttatggcggatagtgcaagcgtgcaagtaaaagcgtgtataaactctctgtattcaggcagccaagaggattttcttgtaatgttttgtgttaccgcttttagttgattaactttgtaacctctgtaacggttacgggggttacaaaatttatataactatgaggttctatgatcgtacgaatgaattagctgagttacagcgtataaataaactgtcatttaatgaccactcccgcttgacggtagtgaccggtaggagacgtatcggtaaaacaagccttatcatgcgatctatagaagactcacctactgtatatttatttgtaggtcgtaagaatgaggcgactctttgcgctgagtttattcctgtcatcgctcagtccctggagacttttgtccctaatgaaattcgcactttccggtcattgtttcagtatttgatggaattgtctgtgggcaggacatttaatcttgttattgatgaatttcaagaattctacaatattaatgaatctgtttatagtgatatgcagaatctttgggatcaatatcgtaggaagtcccgtatgaatctgattgtatccggttctatttactctttgatgcaaaagatatttcagaattcaaaagaaccgttatttggcagggctgataatatcattaagttatcggcttttagcttaactactttgaaggagatcatttacgatcacagacctgattattctaatgatgatttgcttgctctttacgctttcacaggtggggtgccaaaatatgtagagttgttctgtgataacggagcgttgagtgtagacgaaatgataaatttcatgattcgggaaaactctccttttaccgatgaagggaaaaacttgctggtagaagaatttggtaagaactacgctacctatttttctatattaagtgttatttcgggaggcattaatacacaacctgaaatagaggctgcattgggaaataagagtataggaggacagattaaacggctaattgtataatataatcgtacggaagcgtcccatattggcaaaagaagaacttcaagccggaattgttagcggcgaaagttgaacatcttaagcgtaaactattgcctgaatatcagatagaaatgatttgtttatcattagaatctatgtaacatatgcttgccggtttatgacttttaaaggtcggtacaaaaaagtctcccttcggattatgtatcggagggagacttttaagagaagtgtaataaagagagacaggcttaatctatcttcataaatttctgttgtataacctcattatcggtttttatgattatgaagtaaatccctttactcagtgaagaaacattgattccttcgttgggaatcacctgtttgtccaatatcagtgtttgccccgcagtatcagagatgcgtacttcttcaatgttgccaatctctccccgaatatacaagcggtggcgtacgggacttggataaaccaacagtccttccgaaataggagtaattccggttgcttcgcctatatgcaggctgacaggagtggttaaactgcccgtcagtgtaccgctccattctatttcttccttgacgttgtattcctgctggtcggcggtgtcgaaggcacgtagggtcagtttgccatcggtttgctctccatgtgcagtgataaatagataaccgtctttttcaacggctatacctctacattcatcgcccacaaatacaccgacaaggaatttccctatttcagctttttgctctccgttgtaaagctcggctatggcaatcatgttgtcttcggactggtgaatgtcataactccattgtgctgatggagtggatggttctgattctgtaccattcgcagtatagttgaaagacttcactgattgagaatagtacatataaccttcacctggaagcaggtgggttaggctacctgtccatgtacttccatcgtatatggcaaaactatccaagcctttgataaggtcattctcttcagcttgcagattttgcaaggcttgctccaatggtaaagtgacggtaggaatataacctatccagttccagccctggtttagggtaatggtgttgcttgtcggatctgccccctttccggtcagttcaagagttgcctctttcttcatctttatcttgtaagcttgagtagtgctcagactgttcaatgaaccttcccaatcattttcatttttgttcgtcagttctccgttttgtccttttaggatgaggacggattctttgatgggagcgagtagagctggtatatcgtttagattctggtcctgcacgttgatagagaaccagttccagcccatagagagggtgtagttgcgggtgatttctttttctccggcttccacaacgctcacttttacttccggtttcatgtccataccttcgacggcaaattgtatcatagtctgtcccgggagctcgcctgatatgatgaaggtagctttaccttcttcgttcaatgtggcttctgccggttctatggttgcgatgatggaagaaacggaagttgctgtcactttcttgtctgttgaggcttctgccggttctacggttactgtaatttcagccgtttcattgtacaccacttcaatctcggaagcgaccactgccttgggctctttttcaatggctatctcttggctataatcgctttccatttgtatgccggcatagctcttcacacgtttgctgacagtcagtatcactttgtcggtggtagccagagcctcggcagggacaaagcgcactttcgaaacgaattgctcattcttgttttgtgggtttgcttcggcgttcttgaaagtcacttctcctgctaccgcttctccgttgcgagtaatggtgatgaactcggcagtcatagtttcgggcagcatgaacttgctgaaatcaatttctatgcctgtctcataaccacgtatggctgttacggtaggctgtgcggtttgtaccatgccaatgttcacttccaactgcgggggaggaacggggagccattcactgtaagttgtctggtagccttctttttcaaatttcacttgccagagaccttgggggacatcccaggcatacataccgttttcgtctgtgaatagtggattctcctgagcatactcggcagcatcccaaagtacaatattctcgtgcaggtcgccatacatgtcttccaccatttctttgtagtaacaagtggcggttacgccttgcaggcggttactggcaacagcttcgtagacatagccggatgggtccattacgtaattgggatttgggttgcctgattctccggaatcgcttccttttccaccgttgtcatctggacaatcgggggcatcatgaatccgttgtaggtaggcatgtcctgcccttgttaaatcctgcattccatccccaaaactacttgcagcgtcggcggcaccccaaagggtatttcctgcatcaataacattctcaggacgtccgcttgatgaactgatgagatttgctgaatgtgctaagaaactacctaaagagaaacctacgcattgccttaaatgcatgatatctgagtgcagatttatgtttgtgatatcgtctgcgcatttcaattttctgttagcttcgtctattgccccttgaatgatatgatcccgccattggtttaaccggtccgttgagggagcaatccgatcacttccgggatcaaagccggctatccttgttgtggtgtttatattctttccgaatagagtcacataatccttgtatgattggacatcatcatagccgaaatatgcataaacgaacaggctgtcgcttgtttctcttgttatctgataagcatctgtatcattcacataatacttgaacggacctttttctatgcataatttgaatgttgaatttgctattttctttgttattgcctctttattctttatatccgttttaataaaaaagcatttaagggcgatgtcgctggattttgacttcatagagtaggtaaatatgtcgtctgtatcgtcataatcttctattacaggaatccctatattcttttctaacgtgttgatgtaagccaatgagtcgcacatactataatcgatgtaatcgtaggttacgctcaggtttacaggcaatgcttctgactggaatggatgagttgcaacccaaatatccttagtctgattatagcttgcgggtatgcggacgatattattggaagaggttttcacatgaagtgcaacatttgttattatttccggactattattggtgaaatcaatcttgaaggtaaaatccggataattaggccaataccaatatgtttgggcagaggttatcggattaatgaagtcaaaagtcgtcacatattctaatagatccagcgaagaggctccgtgggcaatattaatcatcgttactttagatacctctattgcgttctcattatagagcacaggacaagtttctgtttgtaactctgctccgtctttggttctaatcttagcgtagatatcgtgcgaagatagattctttgcgttataaagttcgcatgtggtgtaccatagtccattagctaatgaggttgtttggcctattaatatgccgttatcgtaaatctcgacttctgattttccaatagctgtgccattgattgaaaaagttttcttagctacagttgatggtatggagatggacaagtcctttattgtacaggtggtggctccaataggttgcaatatttctttcccgttcagcgtaaactgtacaaaagcattggggatgtactcaccggaggcagttgggattacacagaaacgaaccaactcggtgtagttgtgtaatggaattgttagtcgattattgtccaaagtataactcgctatgttgctgcctgtcatggctgagttttccacatataaagacgtttcaggtaggtcaactatcagctgtacgttgctgaccgaagcggtgtactcttctttaaaatcaattttcccttttaacgtcagataattaccggctacgatggaggctttgttggcagtaaatgacgtattatctcccgtgtaataaagcttactttcatccagcattggaatatgactgttagtaatggaagagagaatgccgctttttacggttacggtgttttgtacataatctgttccttccgtcagtccggatgcggccagttgggatatcttcaaaatagaattgaagaaagcgctgttgaccatactgaccagggtatatttcccgtcagagagattgctgatggaaaggcattgattgaagtaagtatatttctttagtaattctcctttactgtcgtagaggatccctactatatcggtattgtcagtatcggtgtaggaagcgctaataccgcccaatgctataatgttgagcaaaacgtttgctttctctgcattctcgtccactgttgcggtggctgttacggaacggaaagctccgtttttactgctagcgatgatgcggagccggtcacccgctgccacttcttccaaaagcacaatggaaggatattgtactgagaaattggtgatttctttttcttgtgtctcattatatatagtataagctatattggcataatcggaataccaattctctgttctggcttcctcatcagttgctacgctgggggtataggtgaggttcaggttgattgttgtgccggatatggctttcagttcaaccgttcccaaatctgctcccgcgttgaagtttgctttcgtcagtgtctggctgatatagtcagtagcagaaaccgaaatcgtactttcatcattaaagacatccagttcgaactcccctttggtatcggtttgtgttataaaagattttgagtacttgccgtttaacttttgggagatggagataacagctcccgataatgcatcactattggcatttttgacaagtcccgaaacagtcagcatttcgatgggaattagagtgtaaaccagctggttctcttcttcttttacactataagtttgattctccggtgttacgtattgcatccctaaattctgatttaatacgattcggtagttcaacttcgtccctgctgtttgtgctttcagcgaactgccttgtgataaatatgtctgttggtcattcaaccatgtgacttgtgtctgatcggtaacatctgttccatctggcgtttgcactttcaagtttacgtcgagcagggttagcagtgaactgaaagtaacggactggttctcctcttttatttcaatcttctctatttgtcccaacactacatctgcaggagttttcagataaacattataagtgcagtttttcagtagtccgttgaaagtgtaagtgatgcggtcggatacaacgtagcgttgtttctggccgttctgcaagttttgtaattctatagtcatgttcttgtaagtgctctcacttccgacagggaggttcacctccaacgttctgacatcttcagtcagtggtagaatggtaaagtctttccaaaccgcagcctctgcatagagtggaatggaagaggacagaacacgaatgacggcattttcggcaattccttcaaaggcacgttcatccgctatcggcggggtgatggcgtaacaactgatgtctgtcagatttttgcaatttccgaaagcatggtagcctattttttctgtacaggcaggtaggatagccgttgataaattagtattgtcgaatgcatatgggggaatttccgtatatccgcctgttcggcttaggtcaatcaatgtacagttgttcaacctatctacgatgccgaagtcatgactattcatctgaccgctgataatgaccatcgaaactttgccatagttgtttgaaccgccggttacctggtctacggcattcatgatgcttcccggagtgaagtcgtcaataatcagttcgcctgtttccgcatcccagtgattggctcccggattttccgggtttgccggattaaagtggaataaaccggtgatggaaacgtcttctttccccattacgaacgaatatactccttccgtagacagtaatttatctccctgtttccacccctcaaactgatagttgctgttcggataggcatagactgaaatcgaagctccttcactgaaacgttctcctgaagtgatattgaaacttcctccttcggccggagaggccgtcagcaccagtttgtatttgatgacttcctgcgatggatcgtcgggattgtcggggttgaagctatctgtagctttgaacacagcggttatggccgtattctttgccggcatggtataattgaaagagcggttgcgggaaattgtatctccgtcctgtatccaaccgacaaactggtaatagttgttggcattggcgctgagataaacagattctcccaaagcgtattgctgcttcccagaaggtgaggtactgcctgcctcgtcgggggtgacgttgaccgtcaaattgtatctctggcccggttcgccggggttggaggggttgaacccatcccctccttcttgtccccacgccgcgatgctccagagagcaatgaataggctgagtatatatttcatggatgttctgtttttatttggttaccataattttaaatgtctctttaccgatggttacgatgtagaagcccggtgcgacggggagggagattgatgactgtgtcaatatccgatgctcaatgacttgtccggtgacattgcagaccctcatttcatctcccggttgcgcagatattaagatttgtccggctcctgccgtcacttgggcggtattcgtgtcctgagtttcttctactccggtaatggtacgggtagtcagacgcagttcgaagcggtcggtgcagaagccggcttctgtcgtaaaggtatagctgtcgaggtcgagacgcgttttgcttcctgtcagcttatctgttaatatcacttcgtcggctgtaaccgtggcgtctgccagactcagggtatatgtgccggcttttcctgcgtaaatgcctacggagacagttccgttgctcaacggtcgttcgttgatggcgtaatatctgccagtagcgtccaatgtgaagagttgtggcacgtctttgtcgtcgctcatgaatttggcggcgtcgcgggacatttcataatccatgcttgcttcgggattgataactacacgggtacggtcggtataagtgtcatcgttcaaagtgaaattgaagacggtacggttcggcgaaacggtggaacgggtcgtggtgcgttggcgtacagtggcattcagttggcggccttcggcagagaaactgatttctttcatttccaccggcttctgaatgaagaatgcctgcatcggactgagtatgtagttatcgtcttcggttgagacagcggtgtaagtccggttacgggtgtcccatattgtaatgggagaggtgtagtccatgtaataaatgtcatagaagcatggataggggttgcctatgaagttccagctggcattgtgagcgaactcggaggcgtactcattcagtgttcgttttaaggcattgccagagaagagccggttcttgttgtcattgttgatggctttcagagtgagttgggtttgtttgttggcttggatgatatagccggttccagcttgtaacgttccgtcagcgggtacgtctttccagttgccggtttcaccgttggctcgtgctttaccgtcatagtagcggatgacaaagagggcattgttgtccacttgcatatctgccctgttcacatcgaaaggaagcgtgataaactgccagtactctcttttcagattcaacttgtagatgacactgtcggcacgcatggctccggactcgctgagcaagttcgtataaacggggttgcggtaggaccaattattgtcgtcatatccactaagagtgtggctttgggtgtacttcttcatggagagtgcatcggtgcctctgacggtcagttggccgttatcaaataccgatacagttggattgtttttgaagcggatgtctgccgctatgaccagttcaccctgtacgttgataatgtctgtttcataatccagcgaactgatgatggggaatgcatcccagcccggagcgagtttgtagctatttacggaccagaaggggacgataagttccgcatgagatttgtctacattatacaggatgtcctggttatcgtgcagggaaggagggacggaagccaggctggtgactttctttatattatagcattcataaaatgggtagtaacagtaggttagggaagctggtagagcgatttccgtcagacttgtgcaacggtagaaaacggcatctcctaatgttgtcaatgtcgaggggaaagagatctctttcaatgcgctacattggtagaaagcgtgataatcaatgttcgttagcccttcgggtaaaacaactttctccaatgctgtacatttctcgaatgcactgtttgaaatgtttttcagattggtagggaacttcacttgtttcaatgcgctgcaattgtgacacattctactctctatatttgttattttgtcggggaactcgatgttcgccaagctcgaacactcttcgaaaatgctattctgcatttctgtcagagtgcccggcagtgttatctcttgcattgaaagacatcggtaaaaagcatattctccaatacttgtcactccttcggggattgaaatccgagttaatccgtaacactggtaaaacgcataccttccgatacttttcagcgtagcgggaagttttatgtcgagtagggcggccctttcgtagaagaatttctcaggcaatgtttctatggttgctccggtcaggtctatagtaataagattagtggcttgctgttgtatctgataaaaatcatcattgttcagcgggccgtttattactaattcgttgacttgctttacatattctacttgtttgagaatttcttctcccaaggttccggcagtggccagagttacggttactttctttggagtatttccgtctattattacctgattagaccagtaggaagcatccttataggtctgtgctgcgccctccggtacataaaacactttggtataattaaaggtgtttccggctatcgatggtgcggttttgcctttgagtgtggcggtatggaggcggaaacaaataaaaaaggcatattctcccattctctccagcttttccgggaatactactttctgcagttgctggcaatagcagaaagcataattcccgatggttttcagactatcgggcagaatgacttcagagagattgctgcgtagaaatgcgttgttgcctatgactctcaatttcttagggaaagtcactttcttcaagtcgtagcattcgtaaaaggcggcatcactgatggtttgcagatttgcgggaaatgtaacttcggataagccgctatggtagaatgcattgtactctatggtgaccaatgtttcaggaaaactgatatcttttaaattggaacagtagatgaaagcgctatttcctattgtctctaaattatcgggaagcatcacttccttcaggcttttcatttcgtagagtccggaattgggtaatttgttttccggcactgtaactttacgtaaattcagataaacgaggtttggcatctgtgttctgataaaatcaaagtcgtttctattcagattacccgaaatagtgatgctgtcacaattagcaacttcaactacggaattcagctgtcccgccgtagttacttccacgatggcgtgggttgctgatgcctgattcataaatgccattgagataatggctgctaatagagtagtaattcttttcataagcagttgaatgttattgtgttaaagtaaaatgatatgcatacttctgattagtttattgagtttcttgttctcgttcttaagccgaaaatcagactacaaatattataaaatatatcctaaaaaacaattatttagagcatgtatttgtatgaataggagaactattatttgtgatgatacatatcgttttcccatttagttccaatttcttgctgtttgtctttagttttggcaacttatctttttttctttcttcagaaaagagttttagttttgtaatagagaatgctattatgttaattcgagaggggggacttgtgatgaaaattaagttatatacttcaccacttcatatttatttgtacttttggcctgcgaaactttaattaatgactttatgaaagttggaaaaatctgtttgttgttctttatgagcgcaagtatcctgttggcgggatgtggtaatgccaaaaataagaagggtgaagataacctggtaggtaatgataaagacgatcatggttgtattgcttccgcaggttatacctggagtgaggttcggaaagattgtatccgcctttgggagcaaggtgtgcgcatggagtctgttgctgataaggcaaatacggcatttatagtttttgcacccgattcgctgcaagtggaattgtttttctctaatgatcagccaaacgaaatactggatcgtcgctccttgcccgttggtggttatgcgtggaatgtagaagacgatgatacgaagaatgttcgtcaggaaaatggtaaatggacaatcagtcaaagaggaaatctgatttaccagcaggtagacgaggataagtaatttttccgataatgaaaaactttgccgctatagactttgagaccgccaacgagcaacgtaccagcgtgtgcagtgtcggcatagtaattgtgcgggaaggagagattgtagatacttattatagtctgatccgtcccgaaccggaatattatacctattggaacacgcgtgtgcatggattgacattggcggatacggcaaaagctccgatatttcccaccgtatggcaggagatagcgccacttattgaaggattgccgctcatagcccataataaaggttttgatgagagttgtctgaaagccgttttcagaacttatagcctagattatcccgattatgaatttcattgtaccttgagtacggcacgaagacggatcaaaggtttgcccaactatcagctgcatacggtagctgcctactttggttatgagctggagcagcatcaccatgcattagccgacgctgaggcctgcgcctggattgcccgggaaataatagaataacaaagaaaaagaatacgaatatggatttagcatcacttaccgcaaaagtttgccgcattgctatggatgcaggaagtttcttgaaagaagagagaaaaactttccgcagtgaaagcgtggagaagaaacatgcgcatgactatgtgtcttatgtagataaagagtcggaaaaacagattgttgctgaactttccgttttgttgccggaagctggttttattacggaagaaggttcggcagtgtatcaggatgaaccttattgttgggtagtggatccgttggacgggactacaaattatatccatgacaacgcgccttattgtgtatgtatagctcttcggtctaaagaggaactcttgattggagtagtgtatgatccctgtagggatgagtgtttctatggctggaaaggtggaggtgcatatgtggatggccagcggatacaggtttccaatgtgcagcagatggaagatgcttttctggtagttgaattgccttataactcatgtcaatatgcccgtacgggagaacatctgatacataatttgtatggtaaggttggtggtatccgtatgactggttctgcagctttggcaatatgctatgtagccgccggacgttttgatgcctgggcggaagctttcatcggcaaatgggattattcggctgccgcattgctggtgctggaagccggtggtcgggtgactgacttttatgggaatgagaattttatagaaggacatcatattattgccacgaatggatatctgcatcctatattgcaacaactgatacaagaagtccctccgttggggatgtgacataaagaaatagcctgatgaaaaatactgtgaaatattggttcggtcctttgttccatcttttttttccacgctgctgcgcagtttgcggagcatcacttatagagggtgaggatactatttgtactcgttgcaatatagatatgccgcgtacgaattatcataaaatgaaggataatcctgtagagcatatgttttggggaaagtttcctctggaacgtgccacctcttatttcttttatcggaaaggaagtgatttccgcaggatcctacatcaattgaagtatggtggaaggaaagaactgggagcgatgatgggacgttgcatggcggcggaattactgccgaccggcttttttgaagatgtagatgttgtcattcccgtacctttgcatccccgtaaacagagagctcgtggatataatcaaagtgagtggattgcccgtggcgtgtttcaagtgacagggatacctgtagatacttcttccgtgatccgcgagaaacataccaatacacagacccgtaaatcgatttatgagagatgggagaatgtggaaggtatttttaaactccgccatccggaacgattagtagggaagcatattctgattgtggatgatgttttgactacaggagctacgactactgcctgtgctgatgtatttcgtgagataggagggatacgtatcagtgtattgacattggcggttgcggaagcttgatgaagataactaaataatgaaaacaaaaaaggttcgccataatgacgaacctttttgctcttcctcttggacttgaaccaaggaccctctgattaacagtcagatgctctaaccgactgagctaaggaagaatttgcatttaagtttttcgctcttcctcttggacttgaaccaaggaccctctgattaacagtcagatgctctaaccgactgagctaaggaagaatgttgttttttctcaaatgcgctgcaaaagtaataggatattttgaaatatgcaatatctttgcaaaaaaaatatcgaaatggacaaaataattggaatgggcaatgcccttgttgacgttcttgctactctcaacgacgaccatattcttactgaaatggaattgcccaagggaagcatgaccctgattgatgaaacgaaactgctgataatcaatgaatgtttcagtgaaatggaaaccgaattggctactggaggctctgccggaaatgcaattcgtggtatggcatgccttggtgcgggaacaggattcattggtaaggttggtaatgatgcttatggaaaattttatcggcaaagtttgttggaacggggaacggaagcaaatttattagtttcttctgagttaccttcgggggtagcttctacttttatatcacctgacggggaacgtacttttggtacttatttgggtgccgccgctacattaaaggctgaagatctttcgcgggagatgtttaaggggtatacttatttgttcatagaaggttatctggtgcaggatcatgatatgatacttcgtgccattgaactggcaaaagaagccggattacaaatctgcctggatatggcaagttataatattgtggagcaagatcacgatttcttctctttattgataaacaagtatgtggatattgtgtttgccaatgaggaggaagcaaaggcatttacgggtaaaggaccggaagaagcattggatgtgattgctaagatgtgcagcatcgccattgtgaagttgggtgccagaggatcgctcattcgtaaagggacagaggaagtgcatgtgcatgctgtcactgtggatagagtgatagatacgaccggtgcgggtgattattttgcagccggttttttgtatggactgacttgtggatattcattggagaaatgtggcaagataggttctatcctttcaggaagcatcatccgggtgattggtgcagaaatgcctgccgagtggtgggaagatattaaaacgagaatcagtgaactataataaataggatatgaagaaaatactgaaagtacgctggataactaccttactgttagtagtaggtgtagttgtcttttttagtttcaagagtggtgatagccgcagtttccagattgcaaagaacctggatatattcaattccatcgtgaaggaactggatatgttctatgtagatacattggacccgaataagacaatacgagagggtatcgatgcgatgttgtattctctggacccatatacggaattttatccggaagaggatcggagtgagttggaacaaatgcttaaggcttcttatggaggtataggttccatcatccgatatgagcctaaattgaagcgtacagtaattgtggagccttacgaaaatatgcctgctgccgaagtgggattgaaagcaggtgatatcttgcttgaaatagatggaaaagatttgaccggaaatacggatgtgagcaaaatacttcgtggacaggtagggacaagtttccaactgaaggttgagcgtcccggtgaggcaaagccattggattttacaattgtccgtaaaaacatccagttgccgtttattccttattatagtaagttggataacaatatcggttacatcaacctgagtactttctcaggaaatccttctaaagagtttaagaaggcttttcttgatttgaagaagcagggtatcacttcattggtaattgatttgcgcaacaatggcggtgggttgctggaagaggctgtagagatagccaactactttctgccccgtggtaagacgattgtaacaacgaaaggcaagataaaacaagcaagtaatacgtataagaccttgcgcgaaccattggatacggatattcctattgctgtattggtaaatagcggtactgcttctgcttcggaaatcctggcgggtgcattgcaggattatgaccgtgcagtgattgtaggtaaccgcacgtttgggaaaggtttggtgcaggtgccgcgtacattgccttatggcggtacgatgaaggtgactacttccaaatattatattcccagtggtcgttgcgtacaggcaatagattacaaacatcgtaacccggatggtagtgtagggcgtattcctgatagtttgactacagtattccatacggctgtcggacgtgaagtgcgtgatggcggtggtgtgacgccggacgttgcagtggaacaagaaaagttacctaatattttgttttatctggtaaatgataatctgatctttaattatgctactcaatattgcctgaagcacccgacaattgcttctcccgagaatttcgaagtaacggatgctgattatgcagagtttaaggaaatggtgaagaaggcagattttaaatatgaccagcagagcgagaagattctgaagaatttgaaagaaatggcagaatttgaaggttatatgaaagatgcttccgaagaattcaaggctcttgagcagaaacttagtcataatctggaccgtgacttggattactttgcaaaagatatcaagaatatgattgctcaggatatcattaagcgttattatttccaacgtggtggtatcatacagcagttgaaagatgatgatgatttaaatgaagccgtgaaagtgctgggtaactcggaggagtataagaaaatgctgagcgtaccggaaactacggtcataaaagagaaggggaaagaaacaagcttggtgaattttaattcataccgaaaaagcagtctgatgatttttgactatgtagtgtaggttatagtttgtagcttcttaaaataagtaaccggataattttacggtctatctttacctttccggaaaagataatccataaagttatccggttttttggtggaaaacaattacctttgctggcaggttacttgtaaatcaatatatatgagagtatctctgttgctattttgtatattttctctttttagtagcttatcacgtggttcctctattcctttttctcccatcgtgaggagctattccgtatcagattataatgcaggtattcagaattggtctatcgctcaagatgataggggagttatgtatattggcaataacaaaggtctgctggagtttgatggaaatagctgggagcttcatgaattgccttccaggaatatcgtacgttctgtatatatcggtaaagacggcaagatatttgtgggctctttcgaagagttcggatatttcgaacgtaattcattggatagccttgtgtaccactctttaaaagatgaagcgaaagatttccggttccataatgatgaaatctggacgattacgtcggcacatggggagattgtatttcaatctttcggttctctgttcttttatgacgggcatactgtgaaggggattcgtacaaaaactcttcctttgaatttatttcaggtaggtgatacggtttattctcaacagataaacggagggctttttgttcttgcaaagaatgggctggaaaatctgattgaacgaaaatcattgggcaacagtgatgtggtggcaggacttccgtataatgatggcgttttattcctgacacaaaagagtggcggttttgtttatcaaagcggaaagatactgaagtggcatacagaatgtgatgccgagcttgaaaaatactctgtgaaccgggctgtaatgaccaaagacagttgctatattatcggtacgctttctaatgggatttatgcaatagataaagaaggacgtttactttggaaggagaatacggacagtcgcttacagaataataccgtattaggactgtattgtgatgccgataacaatgtttgggcagctttggatgaaggtatagcctatatacaaaataactctctggtatattactatgagcctccttaccggaaaataggaatggtctatgatgtgctggtgaaagaggatgaggcttatatcgcttccaatcaaggactttacaggattaggaacagagtccccgaacttgtgccgggactggaagagcaggcatggtttgttggtgaatggggaaaacagattttatgtggacataataaaggaacttttcagatatcgggttcgcaggcatcgctgatttcggatgtgagaggagcgatgtgcatgaaagaagtcaatctggaaggacgttcgttcttattgcaaggtacctatacgtttctgaatttatacaatgaggagtcttcgggcatctggaggtttctgcggtcgttaggcgggtttacccacatggtgcgggagatcgagatggatccccaggggaatatctgggtgaagcatttacggaaaggattattccgttttcggattaatccggatctgaaacgggtagaagatgtcagaacctatatggaactgggtgatgtgaaagatggggacttctctttgtttaagatcaacggacgggttgttttttcaaatggggaaatgttttacacttacgaagatatgaatgattctattattccttatgaatcgatgaatgagcaattggcggatttgaaaggaatacatagtgtgagtcatgcaaaaggcaatctgtactggtttgtaaacagcaagatggcatatttggtgaaatgtgaaatgaatgttttccggattgaacatagaattccgttttctttgtttgatggtttgtctatagaggagagagcagcgatggtttatgacaaggcgagtggcagttcttatctctgtttgaataatgctgttgcccggattgattcagatagttctcttttgtacaagtcctctattaggcgctctttgtggatatcggctataacgactgagtcggagtggacgggaaaaataaaaagattgtcggtgcaaaaagagaataagattgatgcagatttgaataccgtatgcttctctttatgctatccggtttataatgactatacttacaaggtaaggtataaattggaaggactgtccgatcagtgggtggaaggtgaccgcagtctgcagaagaaatatacccgtttgccatttgggtcgtatgtttttaaagctgagatttataatgagaatgaagtattggcattggtaacgctaccttttgaagtcttgagaccttggtttctatcatattgggctatcaccggttatgttctgattgggctgttgttgttattgttgttgcaatacatcgtttatcagtctgtgaagaagaagaaagacagggtgattgaacagcaacgcattacccatcaagctgagatagaaatacaggaaaagaagattatcgaattggagaaagagcaactggaagctgatttacgttttaagagtaaagaactgtccggagttgtgatgaccaatattgcccatcaggagtttttgaattcgttgaaagaagaaatacaacaacagaagttatcagggcagtatacgcggaagaatctggataagctcttagtattgattaatcaaagtatcgtttcggatgaggaaaactggaatatgttccaggcgaattttgaccggatacatgagaacttcttccgaaacctgaaacaacagtacccggatctgacggcgggtgatttacgtttctgtgctttactccgcttgaatatgccgacaaaagaaattgccaagttgctgaatatatcggtgaggggcgtagatgcggcaaggtatcgcttgcgtaagaaatttaatctatctcaggaagatagtctgacggattttatgattaattttaaatagttgattattaacgttataatgtgaaaggaagtactaaaatagtacctcctttttttgtgttttgcactaaaggtacttttgttgtagctctgtattgtggcagtttaaggtgctttctctttatttgcagcgaaatcatttttctccaaaaataataaagaatgaaaagcatgagacaattaatccttaaggtacaatcgtttttaattttattggtgctggtatctgccaatgtgcaagcacaaaaatctcctgtcgatatggatcgctttattgatgatctgatgaagagaatgacgctggaagagaaaatcggccagttgaacttacctgttacgggtgaaataaccaccggacaagccaagagtagtaatgtggctaagcgtattcgtgccggtgaagtgggcggactctttaacttgaaaggcgtggagcgtattcgtgacgttcagaaacaggcagtagaagaaagtcgtctgggtattcctcttttatttggtatggatgtaattcatggatacgaaactgtattccctattcctctgggattatcctgtacctggaacatgaaagctattgaagaatctgcacgtattgctgctatcgaagccagtgctgatggtatttgctggacattcagtccgatggtggatgtttcccgtgatccccgttggggacgagtttccgaagggaatggtgaagatcctttcttgggagcggagattgcgcgtgctatggtacgtggttatcaagggaaggatatgagtagtaatgatgagattatggcttgcgtaaagcactttgctttatatggggcatcagaagcaggacgcgactataatacagtggatatgagtcatcaacgtatgttcaacgaatatatgttaccttatcaagcagccgtggaagaaggtgtgggtagtgtgatggcttcattcaatgaagtggatggtgtaccggctaccggaaataagtggctgatgaccgatgtacttcgtaagcagtggaactttgatgggtttgttgtgacagactataccggtatcactgaaatgaccgatcatggtatgggggatacacaaacagttgcagccttggctctgaatgcaggtgttgatatggatatggtgagcgatgcttttacaagcacacttaagaaatctttggaagaaggaaaagtttcagtaaaggctgttgatgctgcttgtcgccgtattctggaagctaagtataagctgggtctttttgataacccctataaatattgtgatataacccgtcctaaaaaacaaatctttacgaaagaacaccgtgctatagcccgtaagacagcttcggaaagctttgttctcttgaagaatgagaatagtgtactccctctggcaaagaaaggtaccattgctgtagtaggtcctttggctgatagccgtagcaatatgccgggcacgtggagtgtggctgctgtgatgaacaaatatccttctttgattgaaggtctgaaagaagtagtgggaggcaaggctaaaattcttatggctaaaggaagtaatctgatgagtgatgccgaatacgaagaacgtgctactatgtttggccgtaccctgcatcgtgacaatcgtacagataaggaactgctggatgaggcacttgctgtagctgccaagtctgacgtgattgttgctgctttgggtgagtcttccgagatgagcggtgaaagtagttgtcgtacagacctcgaaatgccggatacgcaacgtgcacttttgcaggaattgttgaaaaccggcaaaccggtggtattggtgttgtttaccggtcgtccgttagtattgaattgggagcaggaaaatgtacctgctattctgaatgtgtggtttggtggtagtgaagctgctcttgccattggtgatgtactgtttggaaatgtaaatccgagtggcaaacttactgctactttcccgaagagtgtaggacagattcctttgttctataaccataagaataccggtcgtcctttgcctcaaggggcttggttccagaagttccgtagcaattatctggatgtagataacgaaccgctttatccgtttggatatggcttgagctatactactttctcttatagcgatattacattggataaatcgtccatgaatatcaatggagagattacggcaactgtaacggtaaccaatacaggtaagtatgacggttcggaagtagtgcagctatatatccgcgatcttataggcagtgtaacacgtccggtgaaagaactgaaaggctttgaaaaaatcttcctgaaagccggtgaatccaaacaagtgtctttcaagttaacagctgatatgttgaagttctacaattacaatctggattttgtgtgcgaaccgggcgactttgaagtaatgataggtggtgatagccgtgatgtgaataaggccctattttcgcttcaataagtatctgcttggtagtagatagataaagaacgaatacagaaactttattaaaaataaatgtctgataactaattagttctgcgagtatgtagtagttataaagtagtaccatgtttaggcgtggtactcttgtggtagcctgttttttgacttaaatcaattattgctatacgtttgcagagtaattttaaatcaatacaaaatgaaaagaaatctattaattacatgtgtgatgttactgtttgctgtcgtttcgatggcgcagaacaagattacagtttcgggtgtcgttacagataagacaggcgaaactgttataggtgcttctgttcgggtaaaaggacaggagaatatgggaactattacggatatcgacggaaaataccagattcctggcgtaccggcgaatgccactttaatattcagctatattggtatgaaggaacaggaagtggcgcttaatgggcgttctacagtgaatcttatgatggaagaggatagtcagctcattgaagaagttgtagtagtaggttatggtagcgccaagaagcgtgatttgaccggttctattgtaacggtgaaagctgccgagattgcttcaaaaccatctaccaatcctttggcttctattcaaggtaaggtcgctggtgtgcaggttatcaatacaggacgtgccgggcaggatccggaaattcgtgttcgtggtacaaactctatcaatggttatactcctttatatgtagtggacggactgtttacggataacatcaactatctgaatacagcggatattgaatctatggaaatcctgaaagacccttcttccttggctatttttggtgttcgtggtgctaatggtgttattatcattactactaagaaggcgaaagaaggtaagactcaggtcagtattaatggttcggtgggttggaaaaaggttacagaccgcgttagcctgactaatgcagagcagttcaaaatgctttataatgaacaacgcatgaatcagggtggcgatccgtacgattataccgtatggaatgcagatactgactggcaggatgagatgttccaaacaggtttccttactaacaatacggttagcattacagcttcgggagatagaagtaagttttatctgggcttgggatatgtaatggaagaaggttccatcaagagtgaaaagctgaataagtttactgtgaatttgcatagtgaacataaagtgaccgacttcttacgttttggtttccaggtgaacggtgtacgtgcattatatcctgatgcaaaaggtgtaggctctgctttgaaagcagctccgattgctcctgtttatgatacggaaagcggtcttctacatactcttcctgattttcagcgtgctcaggtttggaatcctatgattgaacccgtgttgagaggtgctcataataaatctgcaaattatcgtatggcaggaaatatctacggagaacttgatttaatgaagaatctaacctttaaggctactttctccctggattatgcttccagccagtcacgttcttattctccgcttatttatgtgtataacccggatgtagaaggtggtaaagaaagattgacggataaagaaagtatcagtcagtcgaagtctacatcaatggcagcacagtccgattatgtattgacttatattaatcagtttggtgatcatggtttaactctgactgccggtcttactacgaattataatgaatattctgatttatcgggtggccgcagtcaattgccgggttatggtgtttccattggcgaagatatagataagtggtggattactatgattgatgatgctacatcagctactaatggtggatcccaatacaaacgttttacaatgtcctatctgttccgtgcattgtataactataaaaatcgttatttgctgaatgcttcttatcgccgtgacggttcttccgtatttaagagaacaggaaatacatgggataatttttattcattcggtgccggttgggttatgagtgaagaagcattcatgaagaaacagaatgtaatcgattatctgaagctgaaaggttcatggggtgttttgggaagccagaatacaggaggttcccgctatccggcctaccctaatattacaagttcgggttctgctgtctttggtgataatgttattgcaggtaagggaccggataaactgatttcacagacattgggatgggagcgtaactattcatgggaagttggttttgatatgcatctgttggatggtcgcatgcagatttctcctgtttattacaataagacaaccaaagacttgctgacaagtgttcccggtctttcaggtacggttcctgcattgcagaatacaggagagattcgtaaccgtggttttgagttggcagcatcctggagcgataaaatcggtgaaaactggcgttatggtgtttcagccaatctaacgactattgataatgaggtcgtatcattgataagcaaggattattcaataattaatggcgtttcccgtgtatctgaaggatatcctatcggctacttctatggatacaaagtggcaggtgtttatcagaatgaaaccgatatcgaaacttcagcacctaaccaggtagcttctgtgaagccgggcgatttgaagtttgccgatgtaaatggtgacggtattatctcagagaaagaccgtactatgattggtaatcctactccggattttacttatggttttagcgtaaatctgggttacaagaattttgatttgagtgtagatatgatgggcgtttatggaaatgaggtttatcgtaactgggatagtagtgcctatgcacaattcaactatcgcacagggcatttgaaccgttggcatggtgaaggaacatccaactgggatccgattcttgatccatcccgttctgtaaacctggaagcttcttcttactatgtagaagacggaagtttcttccgtatccgtaacatagaactgggatatacctttgatccccgtttgttgaaccgcatcaaactgcaatctttacgtatctatggtaatgtgcagaatcctaaaacatggagtcgcaataccggatatactcctgaagttggtggtagtgcaacagcgtttggtgtagatggtggcggttatccgatgcctgtagtttatacattaggctttaacttatcattctaaacatgaaatctaataaaagaaaaacgatcagtatgaaaaagatattttattatgtgatggctttggcattgggatgttcccagatgtcatgcagtgacctgttagatcagaaaccgcaaggagtattgactgaagatgacctgactggtggtacttacgaaacacagatttttaacatgtatgctttgcttcgtggttatcatattgtttccggaaatacggcattggctattcatggtatgcgttcggaagatgcggaaaagggtagtacactgtctgacggatctgcaacaggaaaaatgtttgatgattttgaatatgctgcaagtaatggcatggtaaaaagttactggaatgccaattataccttgattcataaagcaaatgatgtattggaggagatgaagtcgaatccttcattgacaggcggtgacttagttaataagggtgaagctttattgatgcgtgctttctgttatttcaatttggtacgtgcttttggcgaagtgcccttgattgattttaaagtagggagtgtagcagatgccaatattcccaaatcttctgtagatcagatatatactttgattgatgaagatctgacaaatgcagaatcttacttgccgaggacttgggaagcacaatatgtcggtcgtcttagctggggagcggctcgtgccttacatgcccgtacttatatgatgcgtaatgattggaacaatatgcgtgcggcagcagaggacgttatttcttccggtttatataatttgaatacaccttatgaagatattttccgtgagaaaggtgaaaactgtggtgaatccgttctggaacttcaatgtactgctactgctgctcttccgggctccaacgaaattggtagccagtatgctcaggtacagggctgtcgtggggccggtgaatggaatttaggttggggccaacatacgcctactcaattattggctgacgcattcgaagaaggtgatcccagaaaggatgagactttattgtattttattagaacaggagaagatccttcgaccattcctgcaaacaaaccttatggagaaaagccgattgccaatgccgatgtgatagcaaagtactttaataagaaagtgtatacagatccggctttgcgcgaaaagtatacgaagagtgggtattgggtgaatattcgtctgatccgttattcggatgtcgtactgatggctgcggaagctgcttgcgaactgggtgataatacaagtgcaagaagatatcttgagatggtacgtgcccgtgcccgtggtatgaatgctaatatcttgccggaggttaccactgataatcagagtgaattgcgggaagctattcgtcatgaacgtcgtgttgagttgggtatggaattcgatcgcttctatgatcttgtacgttggggaatagcgaaggaagtgctgcatgcagcaggaaagaccggttaccaggataagcatgcattgttgcctttgcctcaggacgaaattgacaaatcaaatggcgtgttagttcaaaaccctaattattaattcatatagtaatgaccatgaaaagatatattaatttattgttggcattttgtgtgtcagcactcactttgcaatcttgttttcaggatatggatcatccggcttttgattatccggatagttctgctcccaaagtgttctcaccaatgaaattgttcttgccttttgagaatgatatgcgtgataagggtaattacaccttcctcatgagtgccggaggggatattacttatactgatggcatcaacggacaagcttatcaaggcacaaaagatacttatctgttagcccgtgttccttcttatctgaccgattctatacccgatttaggaagttgtacagtggctttctggatgaaaacaacgagaaatacttccgcatatggtgtcttcagtattcctaataccaagactttctggggtaactttgatatctatctggaaaatacaagtagtgaaacccaggctttcttcaagatgcatatgtataactgtacatcagtgaaggataatgatgagagatgggtagaagctaagatagacaatgtctttggtaccgaatgggttcatatggcatttgtttatgatggtagtaattcgacagtaacagtttaccggaatggtgaaagtgcatttacaaaagaactgcccggttatggaaagcttaaatttaaagatttgggtacatttgctatcggagcatttcagtttagcacaaaacccagtttgacagaaggtgcaggagcacagagttgggcatccaattttccgggacagctagaccagttccgcttctatgacagagctatatctgcttctgatatcaagcaactttattcaggtaaagaatgatgatcgttagaaatagagtaaatatgagagctgtttatttcatactgtctttattactgatttcttgcagtaaagatgatgcttcggaaacacccggaaaatttgaactgcaaagtatatccattggtgagaaacaggatcagagttcctttgaaaatgtagctcctagtgccagtattgtgcttacattcacagatgcagtggatgaagctacgattcaaagtaatatcatattgaaactgaatgatcaggcggtggcgtatgattcaaaactacagggaaaggagaaactctcattgactccaacaggtggctttaaaagtttttcctcatataaactggtgatcaatccgggggtgaaatccacttccggagtatctcttaccaatggcaaagtctatgaaatccgtacagggatggatgattcggataagtttgatcgcattcctgacgaggatttattaactttggtgcagaaacaaacttttaagtatttctggaacttcggtcatgcacattccggtatggcatgcgaaagaacaacttccggtgatgttgttactaccggaggaacaggatttggagtgatggcgatgctggtagcggctgaaagaggatttgtaacccgacaggaagctcttgaaagagtgcagaagattgtaactttcctggataaagagtgtacgagttatcatggagcctatgcacactggattaacggtgcaactggtgagacaaagccatttggtgataaagatgatggtgcggatctggtagaaacctctttacttttccagggactacttgcagcacgtgcatacttcaaggacggttcggaagctgagagtaaattgcgttctgatataacccgcctgtgggaagctattgaatggacttggtttcagaaaagtggagagtctgttctgtattggcattggagcccgaactatggatttgagaagaatcttccgatcagaggttggaatgagtgcctgataacttatgtgcttgcagcttcttctcctactcatcctatcgataaggcggtttatgaagctggatgggcaaggaatggcggtttgaagaatggtaatacctactatggatacaagcttccgctgggagctgataagggtggaccgttatttttatctcaatattccttcttgggcattaatccgaaaggactgaaagatcaatatgctgattattgggaacagaatcaaaaccatactctgatcaattataattattgtaaggagaatcctaaaggatatgctggttatggagcctcttgttgggggctgacagctagtgatggtgataatggttattcggcacattcacctacaaatgataaaggagtgattgctcctacggctgcattgtctgcatttccttatactccggaagagtcgatgtctgcattgcatttctactattataagatgggtgataaactctggagagattatggttttgtagatgctttcaacctgacagctaattggtatgataaccagtgtatagctatcgaccagggaccaatcatttgtatgatagaaaattatagaacaggaatgctttggaatttattcatggctattccggaaattcagcagggaatgaaaaagttaggctttgagagccctgcactaaactgataaatagaatatatgatgagacttataatatatgtgatgcttctgctttacccgtttagcctgctgccggcagcttctggtggtaagaaggagaagaacttgtctgatgaagaactgatgaccctcgtgcagaaacagactttccgttatttctgggattatggacatccggtttcgggcttggcacgcgaacgtagtaacggtaatgacgatattgttaccattggtggttccggctttggggtaatggctattattgtcggtgcagaacgtggatttgtaacgcgtgaacaagcggcagagcgtatgctgaaaatagtcagctttctgaatgataagaatacggacagttaccatggcatttgggcgcattggataaatgggcagaacggagaaaccatttctttcagcaggaaagatgatggtgccgatctggtagagtctgctttcatgttcgaagggctgctggctgcacatcagtatttcaacaaagataatcaggtagaaagacgtatccgtggtcttattaatgacctgtggcgtcaggctgaatggaattggtttactaaaggtggtgaggatgtactttattggcattggtcacccaataacggttggtcgatgaaccatcagataaaagggcataatgagtgccatattacgtatatacttgctgcttcttcacccacttatcccattgcagagtcggtatatcataaagggtgggccaattctatcgttttcaagaatggtaagaagtattacgatataaccttgccattgggaagtgattatggcggacctttgttctttacccattattcttatatgggacttgatccgcgtggcttgaaagattattatgctgattatgaagaacagatgaaagcacatactctgattaatcgtgcttattgcatagataatccgaaggggtataaagggtatggagaacagtgctggggactgacagccagtgatggtgataaagggtactctgcgcattgtcctggtaatgatcgtggtgttattactccaacagccgccttgtcgtctattccttatgcaccggaatattcattgcaagccatgcgatatttctatgaagagcttggcgataagctttggggagaatatggtttcaaggatgcatttaacctgactgctgattggtttgcgccatcttatctggctatagatcagggacctattattgttatgatagaaaattatcgtacaggtttaatatggaaattgtttatgagtcatccggatgtacaaaaaggattgaagaagttaggatttaaaacaccatacttaaattaaaaaggttatataattatgaaaaacatgttttttaatagtgtattagttgctttcgttctgcttgttgcttcgtgcagcaagcagccggaagctaaggttgatgtgatgtcattcaatattcgtctggaccatgtagcggatagtttgaacaactggaaatatcgtaaagatgctgcggcacaaatgatcacttattatgctccggatgtagtaggtatgcaggaagtattaaagaaccagttggatgacctgaagaaccgccttccgcaatatacggttttaggtgtggggcgtgccgatggaaaagaaaagggggaatactgttccctgttttataagaccgatcgtttcgatcttgtgaagagtggaaatttcggtttgagtgaaacacccgattctataggaataaaaggctgggatgctgcttgcgaacgcattgtgacgtgggctgttcttaaagataaagtcagtggtaaagaattggctgcttttaatacacatttcgaccatattggtaaggttgcccgtcgtgaaagtgcagttttgttgcttgcaaagatacgtgagatagcttcggatttaccagtagttattacgggagattttaatggtactgttgattcagacccgatttctgttcttacggaaggggggatgcagaatacttattccacatctgacgtagtttatggtcctgcgtggagtttccatgattttgggcgcatcccggttgaagaacgccagttgatcgactttatttttgtcaatggacaggtggtagccaataaattcagagtgatagcagacaagccggacaatggctatttatccgaccatgcgcctattctggctaatctgacaattcgatagtatcatgacttctaaattatccttggggcttgtcgttttaccttttgtgccttcctccattgtgcaaggtcaagagcaggaagtccgtaacgaacgccccaatattatttttataatgagtgatgaccatgcccgtcaggctatgagtatttatggtcatcctatagggaaagtggcgccgactccgaatattgaccgtatcgggcatgaaggagcggttttccagaataactattgttgcaattctatttccgggccgagtcgtgctgccatacttacgggtaaacatagccataaaaatggtttcatgaagaactgggcgaaaggttttgacggtacgcaacaaacccttccgaagatattacaggcaaatggttacgagacagctgttattggtaagtggcatcttatttctaagcctacaggtttcgatcattggatgattctggatgatcagggagaatattgtaatcctcattttattactgaaaatgataccacacgtcatttgggatatgtgacggatttgattactaagtacacggaagaatggctcgacggacggaaagacaagaacaaacctttctttctgatgatgcatcacaaagctgttcatagaaactgggtacctgcagaaagacattaccatctgtatgagcatactacttttccacttcctgataattattttgatgtttatgagggtcgttatgcggcacagatgcaaaagatgaatatctattgtgacatgtacgaaggacacgatctgaagatggttaccggtatggatagtgacagtttactgttcgacccttggccgcatgcttttctgggaacaatggaaccggatgaacgctgccgctttcttgatgcataccgtgatagaaataatgaattccactccagaaaacgttcattcaaagaagtcgcggagtggaaataccagcgttacctgcaagattatatgggagttgtagcgagtgtagacgaaagtgtgggagagattcttgattatctgaaacgtaccggactggataaaaatacgattgtagtctatactaccgatcagggcttctacttgggagaacatggttggtttgataagcgtttcatgtacgaagaatctttcggcatgccgatggttatgcgctggtccggacatatcaagccggaaactcaggtaacaggactgacgcagaacatagactttgctcctacttttctggatatgtgcggtatcgaagtaccacgggatatgcagggtgtatcgttccgggagttggtagagacgggaaagaaaccgcgtgattggcgtaaatcgctctattatcattattatgaatttcccggatttcatagtgtccgtgcccattatggtgtaaagatggaacgctacaaattaatgcacttctatgtggaagacaaatgggaactgtatgatctgaaaactgatccgacagaaatgcacaatctgtacggaaagcaaggaatggagaaagtaactgctgaactaatggcagaacttgcacgtttacaaaaacaatatgaagttcctcagaatttgtgcaagtaatataaagaacgaaagaatgaaacatctgttattgactatagtctgcctgattgcgtggactactcttccggcgcaggatatgcgtcaggatacatattgtaatcccttgaatatagattatacctatatgatttataattccgaccgggatatttcttaccgttcgggggccgatccggcagtagtggaatttcgcggggaatattatatgttcgtaacgcgctcgcacggctattggcgttccagggatttattgaactgggagtttgtacgtcccggtaagaattggtatcctcaaggatgcaatgctccggctgcacacaattataaggactctgtgctttatgttgcaggcgatccttcaggttctatgagcatcctttataccgatgatcctgcttccggtgattgggaagctacgcctgccattctgcataatctgcaagatcctgatttgtttattgatgacgatgggaaagcttatatgttctggggatcttccaatgtttaccctatccggggtatggaattggataaagatcaccgtttcacaaagaaaggggagacgaaagaacttttcaatctggatatgcctaaacatggttgggagcgttttggtgagaatcatacggatacagtattgggcggttacattgaaggaccctggttgacaaaacataatggtaaatactatatgcaatatggtgcgccgggtacggaattcaatgtttatgcagacggagtatacgtagcagatcatccgatgggaccttatacctatcagaaacataatccggtatcttataaaccgggtggttatatgaatggtgccgggcatggaagcactgtgcttggtcccggcggacagtattggcattttgcttcgatgtctctttccatcaatgtgaactgggaacgtcgtctctgtatgtttcctgccggattcgataaagatggtgttatgtatgtggatacccgttttggagattatccccgttatgctcctgccgtgccgggtaaggcaggacagttccgagggtggatgttgctctcttacggcaagccggttaccgcttctactgtaaaaggagagttccaaccttctgcattgactgatgaactgactaagacattctggttggctgaggctaacgatgaacgccaatgggtaatgatcgatctggaaaaaccggctgctgtatctgctattcagatcaactatcatgattaccaaagtgatatgtatggtcgttatgaagggcttcgccaccgctatgtgattgagggttcattggatggacagaattgggaaatattggttgaccgcaaagaaagttataaagataccccgaatgattatgttgaactcggacaatcccaatctgcgcgttatatccgctataagaacatagatgtaccgaccccgaacttggcaatttctgaacttcgggtatttggattgggcatggggaaaacaccgcaacagccgaagaaattaacccttgatcgccatgcggaccgtcgtgatattactatcagttgggaaccggtcaaaggtgcacagggatataatgtgttatggggtattgctcccgataaactttatagctcttggatggtatatggaaataatgaattacttatgaaatctcttaccatcgatcaggattattacttctgtgtggaagcatttaatgagaatggtgtatctttacgttcagaagtgaaacatgtaaaataacaatgctatgaaacgattaatcagtgcaatttgtgttcttttcttcctgttacctttgtctgctcaggaaacctaccagaaagaaacctttatctcctcccggggagataccttgcagtatcgcttgctgcaaccggagaatatgaaaaagagtgagaagtatcctttggtgctctttctgcatggtgcaggggagcgtggtaatgataatgagaggcaattgacccatggtggacagatgtttttgaatccggtgaaccgggagaaatacccggcattcgtgctcgcaccacagtgtcccgaaacgggctattgggcatactcggcacgtcctgaatcatttttgccgaatgagatgccgttgaacgaaccgataactccgatttttcagacagtgaaggatttgctggatacttatctggcaatgcctcaggttgataaatcgcgtatttatatcattggactttctatgggaggaatgggaacctttgacatggctgtccgtttcccggagatatttgctgctgctgtgcctatttgcggtacagtaaatgtggcgcgcctgaaagctgccaagtctgtaaagtttcgtattttccacggtgatgctgacaatgtggttacacctgaaggttcgcgtgcggcatacaggactttgaagaaggaaggtgctgatgtggaatacattgagtttccgggatgtaatcatggtagctggaatccggctttcaattatcccgactttatgagttggctgttcagtcagaagaaatagtttaaagaaaaatggcaagtagatttatcctgcttgccatttttctttaaactatttttcttcataatccccgttagctttaatcagctcaatcagcttttctacagcttcttcttcgggaatattcttttcaatgcattctttcttcttatacagactgattttcccacgtccggcacctacgtagccatagtcagcatcagccatttctccgggaccattgacgatgcagcccataatacctattttcaatcccttcaggtgtgaagtagcggcttttacacgtgctatggtgctttgaaggtcgaacagggtgcgtccgcatccgggacaggagatatattccgttttgctggtgcgtatacgtcctgcttgcagaataccaaaggctgtggcatctactacggcatgagtgagatttccctggttgaataggaaaataccatcgcaaaggccgtcgaagataagtgctcccatgtcagcagcagattttatctgcaagtcctctgcttcattttcagcatagtgctggaagaatacaaccggatttttcaatccttcctgcatcaattggtgaactaaggcacgatgttccccaagtcggttaggatggttactctgtgatataatgactacttccggatgatatttcagacaagcaatcacttcttctgtttgtgccatataaggcataaacatgaatttcaaatcggcttggcaattgcccataagtggcatttgctggtaattgaaagccggataggttccaggctcttcttcccatacatccgcatccaggatgtattccactccttcttcacgagtttccggtaaggcacgtccggcgtagatataatccggaatgaattgcgggttcgtatcaaattttccgtccatgcgttcggcaatgactacaggcaggtgattcccacctatgttgcgtacggcagttgtctcacgtcgtaccggagaaagatagttgaaaccttctgcttccactccgggtatgtaagggtgatcctggtgctgcatgatgtaatccaccaactttcgtgctacaggtatttctgcttccggagcttcgctcaaagaaacgcggatggtatcacccaggccgtcggctagcaatgcaccgatgcccaatgcagacttgatacgtccgtcctcaccatccccggcttctgtaacgccaaggtgcaacgggaattgcattccttccttttccattacagcagctaacaagcgaaccgtttttaccattactactgtattggaggctttgatggagataacaacatctgtaaagtcttcttttacacagatgcgcaggaactccatgcatgattccaccataccttccggtgtatcgccgtagcgagacataatgcggtcggacagtgagccatgatttacaccgatgcggatagctgtatgattctccttgcagatattcaggaaaggaacgaatcggtcatgtatcttctgcaactcttgtgcatactcttcgtctgtatattccagatgcttgaaggtgcgtgcggcatctacatagtttcccggattgatacgcactttctcgacatactgtgctgctacatctgctacctttgggttgaagtggatgtcggcaaccagtggaaccatatatccgtcccggcgcaaaccggcattgatgttcatcaggttttccgcttctttaatgccttgtgctgtcagacgtacatattcacctccggcatctacaatacgtttagcctgtgccacgctggcttctgtatcctgtgtggcggtgtttgtcatactctgtatgcgtataggattggagccgcccataggggtggctccaatatttacttctgatgtttcccgacgggaatagttgaataaatccactaattactcctttttaattcgttttatactcgtactttacttctttcagctcctcgttcgcctttacgattttctttttcagcccttctttgtaggctgcaaaagtttcagcgagatcggcatcgcttaaagctagcatttgtatagcaagaatggcagcgttcatggcgccattgatagcaactgtggctacagggattccgggaggcatctgaatgatagagtagagagcatctacgccatccagcacagaacctttaacgggaactccgatgacaggtagtgtagtgttagcagcgatgactccgggcagagcggcagccatgccggcggctgcgattatcactttaacgccgcgtccgcgggcgttctttgcaaaatcctctacagcttccggagtgcggtgtgcagaaagagcgttcatttcgaacggtacatgtaaatcattcagcagttgagcggccttttccataacaggaaggtcggaggtgctgcccatgatgatgcttactaatggagacataattatttagttattagtgtttagtgattagtgattagcaaacttctcaatatcaatgctaatcactaaccactaatagttaatcgttaatcaacgctttgtaggcagcagcatccagtaatgaatcgaaatctgcatcagcatccggtttcattttgatgagccagccttcaccgtacggatctttgttaaccagttccggttggtcagcaagagcctcgttttgttccaggatttctccgcctacgggcaagaaaagatcagaaatggttttcactacttcaatggtcccgaatacttcgtcggctgccaatgtttcaccctctgcttggatatctacgaatacgatatcgcccaattgtgcctgggcgtaatcggtgatacctacataagctacatcgccttcaaggcgtatccactcgtgttctttggtgtactttacattttctgggaaattcatgatcattatttttaaaggttaatacttatataattacaaattactaattataaattacaatgtgagccctttttacttctcttaaaagaggaaaatacggaacaggatattactcagtggatgaagcactaataaagagcaaattaatcctacggcaaaacctaccagtacctctcccaatgtatgatgctgtaaaataatacgtgctgtgcccaggacacctgcaatcaggatgaacaggcatagccaccataccggattgtatccgaacaaggcactgaaagataccagccctcctacaatagcccctacacctgccatgtgctcgcttaacttccatttcagattgacaacaatgcagataaccatcatgatcaatgcagcaagaataatccccgtcatgtaccaagggatattcaggcggtgcatcatcaccaggcagaatacgtatgaagtaatagtaagcaagaatggcataaaacgccgcttacgttcacccaagtcttcgggactgaaaccattgattttacggaacaggaagatggtgagcgtaggcataagaatagtgaagcagtacactactccaagcacaatcagcttatactgtataggcatgatgcgcaggtacgagaaaaggaacagaatcagaaacgccaggaatggaatggaaaacggcgtgaatatagccgatatcacccgggctgtccggattaaggtcctgtctgctacaatatgttgttcttccatgaatagagttctcaaattaataattacttcctcagtcttgccaccggtatgttcaactgttgcctgtacttggctaccgtgcggcgtgctataggatatcctttttctttcagtatatccgtcagttcatcatctgtataaggtttctttttatcttcattgtcaatgcattctttcaatatcttacgaatctcacgtacagacatttcctcaccgtcttcggtgacgtatccatcactgaagaagaatttcagtgaatagatgccatagttggtttgcacatatttgctgttgctgacgcgggagatggttgaaatgtctaatccggtacgttcggcaacatccttcaatatcatagggcgcaacaatgattcgtctccttcgaggaagaacgggcgttgcaggtcgataatggcttgcatggtagtcattaatgtattctggcgttgcttcacggcatcaataaagccttgtgctgcatccatcttctgcttcaggaacatcatggcttctttcgattctttcgactggttagccctgtttttggtatgctcttccaccatctcggtgaaatcacggctcatacgcagttccggaacgttccggttgttcagagccagattgatggtaccgtcatcgtatgtatctacaatgaagtcggggatgatctgttgcatgttccggccgatggcttcacccagagaggcacccggacgcggattgagtttgcagatctctttgatagcctgttcaaaagcatcttcttccagtccgagcttctgctgtatcttgtcccaatgcttacgggtaaattcttcgtaacattcggagatgatcgcttcttctatataaagtagagggttcggggtgaagtgctgttgctctatcttgcgatgaatctgaatgagcaggcattcttgcaggttgcgtgcaccgagtccggcgggatcaaagtcctggatgatcttcagtgcctcttccaattcttcctgggtgcattcgatgccggcgtagatggcgagttcatcacagatgctatccagagacttacgtaacaggccgtcgtcatctaatgatccgatcagatattccgccagttcacgctgatgctcggtcaggtcacgttcgcttagttgctccttcagggtttcgtaaaaagaagtggcgtcggagaaaggtatttcttcggcctgttcacctttgctacggttgttttcctgcaatttgtagtcggggatatcgtcttcgctcaaatagtcgcttaatgaatcatattcattggctccgctgtcttctgcggaatcttccgtatcggaattttcagaaaagtcgtcacttgccgtatcttcctttccttcttccagagccggattttccagaagttccgcatgtatacggtcttccagttctacagcgggcaattccaatagcttcactaccagaatctgctggggcgacagtgtctgtacctgttgctgcgcttgagtttgtacttgtctggaaccttgtgccatacttattcttttcttttactcgccgcaaagataatgcaaacgagacagaataaaatgaactcgttcattttttatgccgaggcgcaacttatcttcacactttttgcaaaaatagtgaatagttcgggaacgcgaaatgttctcggcataagtttttcatgcaagcatgaaagattggcgcctaatttacattatctttgctaaaagtgaagataagctgtacatcagcaataaaaataggcaagcttattttgtgctgctttcggtttgcattatctttgtgcgtatcaacttaaaaaattgcaacgttatgtttgataaagaaacttatgtgcagcgcagagccctgctgaaaaaaaatattggctccggagtgttattattcttgggaaatgacgaacaaggactgaattatgaagataatgctttccgttatcgtcaggattctactttcctctactatttcggcttgtcgtttgccggactttccgctatcattgacatcgatgaggacaaagaaatcattttcggagacgaactgactatcgatcatattgtatggatgggtacgcagccgactctgaaagagaagagtgaacgggtaggcattcgggagacgcttccttccgtcgcgattatcagctatctgcacaaagccgtacaaaaaggtcagacagtgcattatcttccgccttaccgtcccgaacataagctgaaactcatggattggctgggtattccgcctgcacgccaggaaggttccgtaccgtttatccgtgcggtggtggcacagcgtaattataaatctgccgaagaaattgcagaaatagaaaaagcatgtgatgtgactgccgacatgcatatcaaggcgatggaagtgattcgtccgggtatgtacgaatatgaagttgtggcagagatgaaccgtgtagccgaaatgaataattgtgaactttctttccctacaattgccacaatcaacggacagactttgcataatcattattatggtaataaaattaaatcgggtgacttgtttctgatcgatgccggtgcggaacttccatcgggctattgtggtgatatgtcgtctactgtacctgccgataaaacgtttacttcgaagcaacgtgccgtttacgaaattcaaaatgctatgcatctggaatctgtaaaggctctccgtccgggtattccttatatggaagtgtacgacttatctgcccgcgtaatggtagaaggtttgaaaggactgggtctgatgaaaggaaatgcggatgatgcagtgcgggaaggtgctcatgcattgttctatccccacggtctgggacacatgatgggactggatgtgcatgatatggaaaatctgggcgaagtgtgggtaggctataacggtcaacccaagagcacacagttcggacgtaagtctcaacgtcttgccattcctttggaaccgggctttgtacataccgttgaaccgggtatctacttcattcccgaattgattgacatgtggaaagaaggtaagaaattcactgactttatcaattatgacaaattggaagaatatcgtgacttcggtggtattcgcaatgaagaagattatcttattacagaaaccggtgcccgccgcttaggcaaaaagataccattgactccggaagaagtggaagctttgcgatagtatcaatttaagaatgagtctaatgaaaaaactactattcttattgtgtcttttgtcttggagtgcattgaatgcacagaagacgattaatcgccctccgtttatagcaaaggcaacggaaaccattgagatagctgccgttcatttatcggatacagctaccgtgattgatgtggatgcaaaatttactccaaagtactggatacgtattgcccctgctacttgtctggtggcagataatggtgaacgttatcaggtgcggcagggagtaggtattgagttgggacaggaattttggatgccagaatccggagaggccactttctctttgatatttccacctttgccaccatctgtaaaatcattcgattttgtggaaggggaaggtgagagagattttaatcttttcggtatcagcctgactggaaagttgcctaagctccaattgcctaaaggtctagagaaagcaggaaaaatgactgctgtagctttgccgactcctgaaatcaaagagggaacagctatcattagtggtcgtattttggattataagccttcattccggatgaaagctgaattacattctgctgatttcttatctgcctatggacaaaagaatacagagttagagttggatgaagtgggaaatttccatacggaaatatcagtttcacacccttctgtcgcctatttaagtgtgggtggatctgttgtttcttttttgttgtctccgggtggagaaaccaaggttaccgtaaatcttcgtgaaatgacgcgtgcttccagtcgtttacagaaagacacgaaggctgaagggaagaaggtttattttgaaggactgaatgcaggattgaatacggaaatgaattccggactggaaattcctctttgttctgttgagctgaaagacttatatgacatgactccggatcagtataaagcatattgcatgcggaaatatgaagaagcggacaatgtgatccgtgccaataagaaaataagtgcagcttatgcggaattgttgacggtgctgaataaagatgcattgtatggactgttatgtggatatgattatcagctattgcaggcttatgctcagcaaaaaggactgtcgttgcgtgatgccggtaaggagtatctctcaaaagagccgtcagatggctattttgactttttaagtaaactggattacatcaattcacccaagtctgtgtattgcttcaattattccggtatggtaagaaatactgcatacatccatttgccgtctgttaagaccgtcggtatctttgattacctgcttgactcatccaaggtaagtccggaggataaggaagcaatgaagaaataccgtgataatccttcgtcgcaggatgcttctataatgagggtgctgagagataagtatgacaacctctttcaggagtgtggaaaagtggctttggaagctaatcagaaggcggttggagagctaataggaggtaaaggtatctatcatgatgtgcagacagcaatacaatgtgcttcaaaactggaagattttatgcctttgtctgaagacgattttgctacattacgcacgattgagaatccctatttcatgaaccaattgactgcaatgaatacggagctgcttcagaagatagaagaaaataagaagaagcgcagttttatggttcgtactctgcccgaagatgtgaaggacgatgccctttttgaagctattgtcgatccgttcaagggtaaagtagtgcttgttgatttctgggccacctggtgcggaccttgtaagatggctatgaagatgatgaaacccatgaaggaggagctgatagataaagatatcgtgtatgtctttattgccggtgaaaattctccggagacaacatggaacaatatgatacccgatattcatggtgagcattaccggttgaccaatgctcagtgggcagctatttgtgataaattcgaagtccgtggcgtacctacttatctggtgctcgaccgtgcagggaaacaaaagtaccggtcggtaggttttccgggaacggatacggtgaaaggtgagctattgaaagcattaaattcttccgctgattgatcatatactaacgtcagttctaaaagatttcaagttgcccgtcattgataaggttgacatcaatggcgggtttacttatcagggagtttctcatattgtttttgatcttggtgatgagtggtataccgaatttctgaaattcactttgcctgtgttcctcacgttcaaccaagtaaaggaggaagaggtgaacattacgagggcttacttacagatcaaggtcaatcactatccctcctatgttagaatagtgtctttatcataattgtgttttttatgcgatgattccctgatattcaatttggcatccagtacaatttttttattgagcaatctatttgtacgaatcttgtccagcatgcagcttgctgcaatctctccgatttcgatacgcggctgttctatagacgtcaaataaggttcgacgacagtggccatatccgattctgaaaagccgacaaaagcgacatcatacggtatcctcaatccgtgccgtttcaaggctttcatcgctccgatagcaacaggatcgttaaatgcaaatatagcatccggtttttcaccgtttccggacagtatatcttccatagtctgttctccatcacgaataaaaataccggaatgaatgatggtagagtctgaaatagggagattggcatcctgcatggcctctatatatccgttcatacgatctttcgttatatccagtttttctggacccgcaaaatgaaatattttccggtatccctcacctataagatgagccactgccgaataggccattttcttatcgtcaataataatttttgtagtatcaatgttggaaggcaccctgttgaaaaacacaagtggaatcccattatcctgtaggctttgatacatatcagagttgacgaaactgtcagatgtcgtggatattattataccgtctaccatgtgttgttctaaaagactcagattggtacgctctgtttcagcggattcgttggattgagtaatgaggatctgatagccctcgtgcattagtattttttgtattccggatataatcataggaaaaaaagatgtgaccaattccggcacaacgattccgatagtataacttttctttgtgaccaacccttttgcctgcgtgttcggatgatagttcagttctgcagcagtcttgataaccagctccttggtttctttctttatttcccaactgtccgataaagctctggaaactgtggaggtggataacccgagtttttttgctatgtcttttattgtaattggcttttccataacatgaatgattgtaggtttgtctgcaaacttacaactttttagacattctgcaaaatccaaacgttcccgggaacgtttccgttgatttttgaggcattatgctattaaaattgattgtacttatataaatttgcttgcgttaaaagctattataatagcccagatcgaaacatttctcaatatattaattctaatcatttttataatgccaaagtatgttaacattaaatcgtattcaatcaagatcaggaaaacaaattgttttttttctgatgtgcctgctggtttcatttgcaggcatcatgccagtccgatcacaggaaaaaactaagatggttaccgttgaaggaactgtcgttgatgaaaccgaaactcctgtcataggagctaacgtctatatcaaaggcagtaccaaaggtgtatccacaaatgtaaatgggaatttcatttttacaggagtacctgtcggacagactgtcactgtctctttcattggttacaaagattatcaggtgcgggttacaaaagggggagagaaattgagaatctctcttgaacctgatgcgaaaatgctcgaggaagtggtggtggttccatacggaggtccggtagcaagaaaggatcttaccggttccgttgtttctgtcaacgttgaggatatgaaggcgcttcaggcagtgacgtttgaaaatgctattgccggcaaggtcgccggtgtacaggtcaatgtcggggatggacagcctggaggtcttccggacattctgattaggggtagcaattctgtaacccagagcaatgctcctctttatgtggtagacggtattccactagagtctcccgataactcgtcaattcctactcagaatattaaaagtatcgagatacttaaagatgcatcggcgacagccatatatggtgcacgcggtgctaatggtgtgattgttattactaccgattccggttcaaagggcgctccgaaaattaatttcgagtaccgttatagcttgtcgaaagactataataggtatgaaatgatgtcaccttatgaatttgtcagacttcagaatgaacttgatgcggcttatggctctatgtatctcgatggtagggatcctcatccggatggaactccatggacactcgatgactataagaatgtgagacctattgactggcaagatgagatcagtcagctcggacagatgcacgaatacagcgtaagcgcatctggcggtactgagaagaccacatatatggcttcattcaattatgccaatcagaagggtatcattctcaataccggtatgaagaactatgttggcagcatgaacatcacccagaagataggcaatcgtatgcagcttgtcatgagagcgaattatgcggagaaggaaagaactggtatgcaagttaactatggacagggatcttctgcttatatgtataaagtgtggtcatacagacctatttccacaaacggtgtggacttgacccatgaacttgaagatcctgaaaggccggaaagtggagtgccgatgttcaacccattgctccagacgcaaaatactgatcagaaatatatcacaagacagttgagaaccagtgccatgttcaattggaatattctcaaatgtctgaaatttactacttcgatttcttatacgagtactgaatcccagactgatatattcaataattccaagacagaagccggaagtacacttccaggaagaaatgacggaattaacggttcgagaagagtaacaagaactaacaatgtcttgaatgagaacactttgaacttcaacaaaaagttcgataatattcatgaccttgccgtaactgtcggttgtactcagcagaaaaatgtttcggatatcttcgaagcaaaagctacacagattcctattacatcagaatggagaggaatagaggcacttgatgaagggctgtctcagaaaatcatgtccaagaagttgacagaatgggcaatacaatctttcatttttaggtcgaattacaactatgacagaaaatactatctgacgtttacgatgcgtgcggacggttcttcaaaatttgcacgtgacaataggtggggcaagttctattcaggagccgttcggtggagattctcagatgagaattttgtcaagaacaatatcggatcatggtttagcgaaggatcgcttaacttgagctatgggtctaccggcaataatggtatcggagaatacgcttatcttccgcagatgggattttcttccggagggacatattatgactattcattcaatgatgaatatcctacaacgggagcgattgtctcatcgataggtaattctaaattgaaatgggagactacatatacctttaatgctagaatggatttgggcttcttcgacaatagaatatacttgaccgccgagtattataagaaagatactaaagatcttctgatcaatgccacattgcctgcccatatcggctatggttcagcatataggaatataggccgggtggagaacaaaggtttcgaactgtctctaaacactgttaatatgaagagaagacattttaactggactaccgatttcaatatttcattcaacaggaacaaagtgcttgcacttgccaacaaccagagtgtgcttcctgctgataatctgaagattccgaatggggctgcattgtatattgcgaaggtgggccagcctatcggtatgatgtacggagcccttacagacggtctttatcaatatgaagatttccgtaagggaagcgatggcagctggatattgagagatgatgtagtttcacagtcaactcatgcaaatagaaagggagtctttcccggatatcagaaattcaaggatttgaatggcgatcttcagattactcaagaagacttgacgattataggtaatccgaatcctgattttacgggcggtataacaaatactttcagattctataattttgatatgtcattgttctttacattcagctacggcaatgatatccttaatatgaaccgttattatttagaagaaggcagatcattgagttccaatcagtttgcttcgtatgccgacagatggaccgtggacaatcctaacggaaaacttccgcgtgcaagatctgcaaacaatacggcttggggcagtgaccgttatgtagaggacggctcatatttgagactgaaaaatttgaatataggatatactctgcctgttcaggtgagccagaggttttttgttagcaacatgaggatttatttctctgcccagaatttgtttacggtgacgggatattcgggacaggaccctaccgtcagcacgatgtcgaatgcaagaactccaggttatgactattcggcataccctgtaccacgtacattcatatttggtgcacaaatttcgttttaatgtgatataataatttatatggatatgaataaggttattaaaagtatattgttcggaattgcattttttcctcttacaggctgtttgtctaatttggatttgcatccgatagattcggacactccgaatacatttttcaaagatagtgcggcatgcgcaaaggttttagtgggttgttatgacgctcttagcgtaccgggaggaggactttttgatggaagcatgaactctcagttcgtcatctggaatgtgacggatgaaatgtataatgcagcagccggaacaggtcctaaggtgtatagctatacttccggatatgctcctaatgctactatgtacaagaatctttatgcggcgattcagcgttgctgtcagttccttcattatcttcctgatgccaagatgacaacagaaacaaagctcgccatggaaggtgaagtgcaatttataagggcattctgttatttcaatcttgtacaaaattatggaagggttcctcttgtaacggaggcatcttcggatgttaatagtacttctgcaaagcaggcagaggaggctgatatatacgattttgtaattcgcgagatggaagaggcagagagtaaggtctttccgattaccaaatttaactttggaggaagaatcaataagtctgctgtcaggggagtgctggcaagggtctgccttttcaatgccggattcccttgctacaacactgaaaggtacaaagatgcatacaaatgggcaaagatggtcatcgacgatcctgctcacagcttgattcctaattttgcagaagcattcattccgcttattcaggacaagtatgatatacgtgaaaatctatgggagatagaagcgtattgtaaaagtacgtctgacggactgaaagaatattttccttcattgtcgacctcgcttggtaccaattgcagcaaagctgtagcaaatgtgtcctttatggttaataatacaatgaagatcaccaaaagaatgttttcatattatgagcaggatactgaggcattgttaggctcttatgatgaaagacgtaactgggctatcgctccgtttaccaatgcccctacgaagcttgatggtgccgatcgtcttgttcttacttatttcggctcgcataaggatcctgataatgacagattggtttatgatcgtcaggtcaacaagttcaaccgtcagtatgcaaagatttggcctgcatatcagagtaatacaggaaccaacctctgtatagtacgctattccgatgtattgcttatggcagccgaagcattgtgtcagataaataatggttcgacacctgaggctataggctatgtcaacgcggtgagaaaaagggcatacggacagatggacggtcgcaagtttattgatcatattgaacttaccaatccgggagaaaattataccattgatgaagtttgtgtggaaattgtagatgttaccgacaatactgcatctgtcacatgcacaacggaagagaacaaatctcccaaggcatatcgtgtcggagacgttaaaggtcctcttacaattgctactgccaagttgcctgagattcttggttctgacgggaaaccggacactaaagccaccagacctattgagtcaatagtattgctcgacaggggacatgcctacagtgaaactccgaaggtggtgatcaggtcactcgagggcgggaaaggtcctaagggtagcggtgctacggcaatcgcagtgatgaaggatgagagtccgtcttatgaattgcctgctgaagctacagactcaaaggaggcattccttcagactattatggatgaaagagcaagggagctatgctttgaaggctggagacgtttagacctcaaacgttggcacaatcttgtggaggtgcttcaggctacgagggatgatggcaggaatgcaaaaggagtcaatggagcgcaacttgattatatcatgactcctggcaacaatgtgtccgatgttcattattaccttccgatcccttccggagaaataatgcttaatcctgaattgaaacagaatgaaggctggtaattgtatatttaacattattaaaagtatgagacaatgaaaagaaatataattagaaacctgtttcccgctttagtcgccgctttagtcgttgtgtcctgccaagttgacaccgtgaccgaatcaactgttgtgactaggcttgaaaagaatgtatacgaagttggagagaatgttcgcttccacttctcaggagaagctgatttcgtgacgatttttaccggagttgataattataatggcggaacgatgggaggaactataaaagggtcgcgttatatctatagaaatcgcggaagggagaatggttctccagtcctgtctttcaattgtaaaaaagatggagataacttggaggagtatgccgaaatcaagcttcttctttctactgactttgacggtgacatcaccatggagggaataaaacgtgccacttggctggatatttctgaaaaagcgaaatggcctgttgaggggactaaaaaaggtgttaatgttaattccggagcaatagatttgtcagaatggaacggacgggatatctatcttgctttccgttatactgcgaaaaagggacagaaacaggaaggatatacaatctcttcattcaatcttaataatacagttgaaacggatgctcttccttatacgatatggacaaatgcttcttttgcaaaatgtggtacaactacgaataaactgcaggaagatcagaccggtgctattttccccgcttatcagtggacacttggaacatcgcttacttgtgcaggcatgcctgacggtaaggaggattttgaaagctgggtaattacttctcctgtcgatccgagccaagtgattcctgattatggtacgcttattaagtcgtacagcgaggttgttccggggttctatgattacacatattacaaaccgggtaagtttacggtgaccgtagtgtcgcgtaatgctaccgcttttggaactgaagaatctgtgcaaaatatagaaatagaaatagttgaaaaataattttctgaaaaatacatttatgaaatatttgttttctacgttactcattgcttgtgtgagtgttttgatgtccgctcagcccaaactgaatcttaatacgggcagtattgattttgaatggcaacaggaggaggatggctggcatatctcgtgtattaaaatcgacgggaagcagattcctgcccccaagggatattacacggttttgtatatagatcgtaatccggcaaaggatttggtcgatcaggatcttgagggaaaggattttacgttctatccgtcaaaagcagaaatgcttcccgatggtactctgaaattttctcacagtctccgtttcggagacgttgaagcaatatggaaggtagatccattatttccgtctgatataaaggtcgatatgaaggtcagactgtcgacgaacggttccgtatccatcgccacccctacgattaccgtcttcgaagagaacaatatatcatgggcgatgattccgggtaattggtatggcaatgaaatccagtataatctgaatatggcaaaaacttacagcatgggcattccttgtgttccgatgcttgcccaagaacgtaatacgatgactctgtgtccgctgtattcgtcgaaggatggctataccttagctgttattccagatccggggacggaaaccgacccgatagccggcaaagctccggataagagtcctaattccttgggattgagtttagcgaacaggcataatgaacttactcccgtggtttatcatccggtactcggacaggtgggagctaagcacaaagccggagatgaagtggtatttggattccgttataccttgaagaactcgggctggttcgatgtattccagcatgcagtgaacgatgttttcgccttaccatcatccttggatttgcttaccaacaaggtgtctttgtccgagcgcgtgagccggcttcagaaattcctgcgtaaagataaagagtcgagctggaaaacatggcagagcagaggtgagacaataggtgctaatggctccaagattgctgacgctggtaccatgtttatgattgcacgaaacgggcaggattccgtaatgagcagccgtcttcactatgtgaggaattataaaatgattcagcagcagacagaaccggggtatttctgcggtgccgctctcggagaatatgcggatatagacggtgtggagtcggaaaggggcaattggatagaacctttgcatacgacctactatactatggtcgatttcggaaatatgcttctattcaatcctgatgacaaggaattgcttgaaaggttgaggatggcaggtgacagattgcttgcatggcagaaagatgatggaagttttgaggtcggctatgacagattttctatgaaaccgtctttcccggatcttaaggattacaggccaacctggtatggattgtacatagcatataagcacttgaaagacaagaaataccttgacgcagcctgcaaaggtgcagactggcagcaggaaaacggagtggataaaggatattatctcggagtatgcggtgatggacgcaatatctgggatttctgtacggcacagacatctcgtgcctatatggacttgtatgaaataacgggtaacaaggcatataaacaggcgtctatagatgccgccatgatttacgcgacgtctatattcaccaatccggtaatgactgatgaaacgaaatacatcggcgagcaagcatataaagattgggagctgaatcagactggtcttggtgtggagcatatacgaggtacggcagtaaacggaccgattttgatatcaagttatgcaggtttgttcgtgaaaatgtatgaatggacggaggaaccggttttccttactatggcaagagctgcgtcaatcggaagaaatgcttttgtcgatcagaaaagcggatgcgcagtctattactggcacggaatgaatgagttgaaaaaatattccacaatgttcccgtggcatgcgtactggcagattggctggattgtggattatctgattgcggaggctggtttgcgttcggacagtaatatttcgtttccatatggctacatgactcctaaggttggcccacatgtcacatatggatttgcacccggtaatatttacggtaagaaagcggatcttctgttcagaccggatatggtcggttgcgataacccggagattgaattccttaccgctttgtcagagaacggcacgaagttatacttgattgcaatgtgtcagtctaatgacagtcagtcatgcactgtaactctggatttgtcgcagttagttgcgaataagacaggtttccgttctgctaaggctcttcagggtaaaattattagatcggcgggaaagaaagggcagatcaatcttgattttgctccatggggtatgaatgtcattgaaatttcactataaacgattttatggaacgattttttatattgttgattttagcggggctgtccgtttcgggagttgcccaaaagagtatgtggctcatagctggacagagtaatgcttccggaatgggtgatagaagaacttcgatgaaatactatagcaaagagtgtttcgactatgtacaatccggagattcgttgaaaatactgcaggatccagtaggtgagaacggcaagtatttcggcaaggcgaacagcggcagcatcagtccttcgttcgcgtggaaccttaataaaatgacaggtgattcggttgtagtggtatctgcggcgaggggaggaagtgcatgctccactacaggagagacaatctacggtacttgggcggaaaagggtgtcttgcctttgttcgatgcagcgatggctaaatgtaattctgcgattgccgttacaggattgaaattcagtggggtgatctggcttcaaggagaacgtgacgcaaatgctatcaatgatgggaaaatggacggtgaggattatgaggcggcgcttcgcaatcttatactccggttcagaaagcatcttcatgatgccgaccttcctttctatatagtcctcacaggacaatatgtcgaccgtccgcaagagggctatcatcaggttcgtgcggcacaacgcagactgtctgaaaaaatgcatggagttcatcttgtagctgcggatccttggctttttccacagatgaatatgatgacggatgacatccattacagccaatacgcatataatcttatcggggaaactatagcccgccagatttacgaagcaagaagtattgattctaaataaaatgaggaaaatgaagaaaaaagtaatagcatcgcttttggccatgtttatcggaggaattgcagtatttgcacaggatccgatggtggacaaaaagaatactgacagtaaacctccttatatctatccggaggaaagcattgtaagggaaaatatagaaaagtggcaggatatgaaattcggtatgtttatccattggggaacatacagccaatggggtatagtagagtcctggtccatttgtccggaagcatataaattctgtatggtgaggccggaaggaatgaactattttgactatgtccggaagtatgaagatttgaaaaagacattcaatcctgtaaaattcaatcctgaaaaatgggctggagcggcggagtatgctggaatgaaatatgtggtcttcacaactaagcatcatgacggattcaatatgtacgatactcagtacagcgactataaaataaccgatgtcgaatgtccgttccacacagatgcgaatgctgacattgcaaagagaattttcgatgcatttcgtggcaaaggtatgatggcaggtgcttattattccatagcagattggaacaataatgactattggtgggattatttccctcccaaagacaggaatataaattatcctcctgaaatgttcccggaaaaatggcagcgcttaaatgactttatcaacaatcagttgaatgaactgaccggaggaaagtacggtaacctcggcatgctgtggttcgacttgtgcgatgcttctcctgacaggcatccgcagtgggaaagattcgcaaagacggtaagaaccaatcagcctggaatcatgatggtggcaagacatacgaataccatctatgaaaattacaggactccggaacagaaaataccggatcgtgccttggactatccttgggaggcttgtatgactatggctactcaatggtcatacaaaccagatgatagttacaaatccacgcatgacattctgactacccttgtacagatagtttcacgtggaggaaactttctactgaatgtcggaccgggtcctgacggagaacttgctccggaggcatatcagcgatttaaggaaatcggtgactggatgcaggttaactcagagggtatccatggaacgaaagcaattgctccttacaaagaggacagaatagcgtttacttcaaaagataacaacgtatatgccttttacttgaatgccaaggatgaatatatgccgtctgtggtgaaaatcagatcattcgttccggtttctgccaaatcggtatttctgatggggcataatcgtcccctcaaatggaaaaaaactggagacggaatagaaataatcataccggagtctgtcagaaagaatcctccttgcgatttggtctggggttttaaattgaagattaaatagagtgttccgaattattgattccattttgagatgaagctttttttctctgttattttgtttgcgatgactttctgtccggtgtggcctagtgccggaaaactcccggatgttccgtccgtgctgtttcttggagtggatttccctgaagaaagtgccacctatattgaaaaccaaattgcttctgggctgaaaatactggatttgacagacagcccggaagtaacataccgctgtgtaaggggaataaaggaagccgcggagatcatatctacggaaaagacaggaagatatagagtatttgtcatacaatgcagagatttgaatactaatgagaatactttctgtaaaatccgcttgatggctgctaggcaaaataccgacatattatggatgacatccgatacggctcaaattgtttcctgtaattgtgattttgctgattatgagggcttttgttccaatcagaaaagttatgactggaagcggtgtatatcatatatcgcagatgccgtgtctcaatggtggaccggtatggcagaaggaaatagaggtattgaaaggctgcctgtatggcagggcgaaattcccgattatgaatattccgggccggaatatatcaattcaatagcgcgtatcgacaggatttccgaaccggaattggaagttttccttccccgtcagtcagagaagtctccggtggtaatctttttcccgggaggaggattgagctataccggctttatcagaaatgcgcgtgaggcggcagagctgttgaggccatatggagtagcggtaatcggtgtaaaatacagggtgaaacgtggacttgacgtggctttggaagatgcaagacaagccgtaaggacagtcagagagaaagcttccgagtggaatatagatgaaaatgcaatcggagtagcaggacagtcggcaggtgcgctgattgtattgaggctggcttcagccgattgcccagacgccttttcgcgccctgactatgtgattccattaacgagttggtattacgggaaacagaaatggccgttcagatttgatgctgagactcctcctttttttatgcgtcatgcgactaatgacagcggttacggttttgcacttagtgtcaaggaaaaactcttggaggccggagttccattggattggaagactgtcgatgatgggggacacggagcttttgaaattactgtcgatggttatggacatgactggactgtcgaactggtagaatggatgagaaaaaataaaatattgaaaaccgataatcatgaaaaagaagttgattagattgtttattgcggtcggtcttgtcttgggggggggctcatgtgctgatgtgactgacactcctgaatattatggagtatataaggaagcgaatatagaaaatataagaccgtcttcgtggttaagagaaatattacagagacagagagacggcctcgggcttaatcgcaaggagtctggttatccttataacacatgtctgtggaatggaataatcccggagggaggtaatccgatagcgaaaggttggtggccttatgaacagtcgggatatatgattgacggtctgtataggtgtggaatattcctgagagacagcgtacttatgcagctcggttccgacaatgtcggatatgtcttatcccatccccgggcgaacggaatgctaggtccggaaacccttggtgagaaccagtgggcattttctgtattcgcacggacgttgcttgcatattacgactataccgaagacgacaggattccggttctgctgaaaaaacatttttctgccttgaatgatactttgaccaacaggcagacttgtatcatagaaagtatgtgcaaaatgtattcatatacgggcgacaaggaaatcttgcagaaagccgggcatatttgggatctgttcagtatgaacgggggaacaaaagacaatgaagtgttcatccatggggatatggtctcttcaaagccgattgacgtacatggtgtgacggctgctgaagtttccaaacagccgttgattctgtatctttataccggtaggcaggaatatctcgatgccgcgcttggtttctattcttccgtggaacgggaaaacgaacttcctgatgggataccggcttcatatgaaagcttgtttcctaagcatgcggaagcgctgcatgagacctgtgatatcagtgacttcatatggagttacggttacatgctgatggcaaccggagatgtcaagtgggcggataagatggaatcagctgtgtataatgcagccttgggagctattaataaagatttcaaggctttgcagtacttctcatctccgaatcagttattggcaactgaaaaaagctccatggctccgtatggtgaagagggcttgtcacgtcaggcttacagaccgggttttgatgttgaatgttgttccggcaatgtccacaggatgtttccgaattatatttcaaggatgtggatgaatggtgacgagcatgagatagttgccgctttgtacggtccgtcggaatataggacagaaattaatggcacaaaagtatgtataacggaagatacttcttatcctttttccgggaaaataacattcaggtttgctctcgatggtgctcctgtcagaataccgtttaccatgaggattccatcatgggtagagaatgcaaagttgacagtcaatgcagaacagccgaaagaatatcatgcaggagggttcagtacgatagaaagacgatttaaggatggggatgtcgtagagttggacatcgatatgaagccgagggcagagaaaagaactgatgccggaattaatgtatatatggggccattgctgtattctgtagatattgatgagaatgttgagatcataaaggaccagttcaagacatctgtagcttttcctgcatataatgtgacccctgcttctaagtggaatttcggtctgcctgaaaaccctgaaataacagtggtgaacacagggaagaaaggattcccgtggacaccagattcaacacctgtcaagcttaaagtaactgcatttgaaattcctgaatggcgacttttgggtgatacgacccctgggctacctgaagagaaaattcaggtttcgtcagaatgtgaagagatagaaatggtaccgtccggatgtacaaggataagaatgacgacgcttccggtggttgaatattgtaaatgaaatttaaaattaaattagttatgagtagaattacgatgactgtattgtctgtccttattttgatatccgcgtgtacatcaggatccaaaacaggaactaacagacaattgcccgtttatcttgatgaatccaaaacgatagacgagagagtagaagatattattccacgtcttacgctggaagaaaaggtggcattatgtcatgctcagtccaaattcagttctcccggagtgcaacgactcggcattcctgagttgtggatgaatgacggaccgttcggtgtaagaagcgaagtcctttacaacagttggacaaaagcggaaactaccaatgattcctgtacggcatttccggctcttacggttcttgcatccagctggaatatggaacttgcgtctcaatacggtcaagctctcagtgaagaggcgaactatcgggagaaagacgttcagcttgctccgggagtaaatatcgcaaggacacctcttaacggaagaaacttcgagtatatgggtgaagatccttttttagtttcgaaaattgctgttccgtatatcaaagccattcaagataacggtattgctgtatgtgtgaagcactttgcacttaataatcaggagtatcagagagataccgttaatgtagaggtgtctgaaagggcactgcgagagatttatcttcctgcctttaaagctgctgtaacagaggctggggcatggtctgtaatgggggcatataataaattcagaggacaatactgctgccacaataactatctcatcaatgatattcttaaaggggagtggaaatttgacggagcagtcatctcggactggagtggaacaaagaatgcgtatgaggctgcaatgaacggacttgatatagaaatgggaacattaaaaccatataatgagtattatatggctgattctctcctgtattttgttcgtaatggcaaagtacctatggaaaaacttgacgataaggtcagacgtgttcttaaacttaatctaagaacggcaatgaaccgcaatcgcccttggggaagttttaatacgaaagagcatactgacttggcacgccatatcgcagagcaagggatagtattgttgaaaaatcgcgataatattcttccggtagatactaaaaaatgcaggaaaatagctgtaataggggaaaatgctgtcagaactcatgccagtaatggaggtgctgctgctcttaaaccaagatatgaaattactccgcttgcgggtatcgaatcgcgttttggaaaagaagtggaagtgtcttttgcaaggggatatagtgcttatactccaatgatagacggaaggatcgcttctccggcttatgacaatatgcagttggcggtagaagcggtaaaacttgctagggaaagtgatcttgtgatatttgtgggaggccttaatcataactggaggcaggacagcgaaggatatgacagagaatcgtacaaccttccttatggacagccggaactcatacgtagaattctcgaagtgaacagcaatgtcgtactggttcttgtttccggaaatgccgtggatttgcgttttgctgaagatgtcccatccattgtgcaggcatggtactgcggttccgagtctggacatgctatagcttccgtgttgtccggagatgtcaatccgtcaggcaaactacctatctcatttcctgcaacccttgaagattgcggagctcatgcgtttggacccgaaacatatccgggagttaatgaaactgtgacatattcagaagatatctatgtcggatacagatggttcgattctaagaatattacccctatgtatgctttcggacatggtttgagctatacttcctatgaatattcggatgcagggaccgatagtttcgtctacagtcctggtgacaaggtaaaggtgtcgttcagtgtgaagaacacgggaacacgtgacggtgacgaaatatctcaggtttatgtttctcaaatcaacccgtcttccgaacggcctgtaaaagaacttaaagggtttgcacgcacttctttgaaatcaggtgagtccaaagtggttgaagtggaacttcctgttgatgactgggcattttgggatgaacagttgggtggatggaatttggaaaagggtagatatgacataagtatagcagctgcttctgatgatatcaaatatgtagttagtgttgaaatcaaataatatgcgaaatttatttttaatcattttaataacgctgggttctgtgcttgtcaatgcacagaacttagttctaccattatatggtaaggctgaatttgagaagattgcttcccttgatgatgaaatgcctgaattgcatgtgtaccttacggataaaccgagtagtcaagcagtcgtggtttgtcccggtggtggatacaagggactctctttcggctcggagggagtctctgtggcaaaatggctaaatcagaacggcattgcagcctttgtcgtcaaatacaggatgccagcgggaaggcaagaggtgcctgtcgaagatttgacaagggcttttgaaatcgtgatggccaatgcggataaatggaatcttgattcttgtagaattggtctgatgggattttctgcaggagggcatcttgcagcaacggggcttgtgacgttgaagggtgaattgaagccagatttcggtattttggtttatccggtaatatctatgaaaaagaatattacccaccagttctcaagatttaaccttatggggaaaagtccatctgaagatactgtaattaaattctctacggaagagcaagttgctgaggatacccctgcgaccattctttttcactgttcagatgatccggcggtaaaaccggaaaattccatcgtgttctatcaggcattactgaggaatgctgttcctgctgaaatgcatgtctatccgaaaggcagacatggttggggttttatcgagggggctcctttcccttatttcaatgaattcaaaactactgttctgcggtggattgcagaacagaacaactaaattttataatatgattagaactctgttattggcagtttggcttatgtttatgcttgctcctgccagccttgctgtggaaaaagaaaaaatcaaggttgcctgtattggcaacagcatcactttcggtgcaggtttatccaatcaggcaagggacagctatcctgcggtgcttgggcagatgctcggttccggttatgacgtgagaaacttcggagttagtggcaccactgtgctttcttccggggacagtccctatataaatactcgtgtgtataaacaggtgtttgactttcaaccagatataatatttattaaattcggtaccaatgactcaaagggtggtaattggaagcataaggatgaatttaaaggagacatgcaggctatgattgacgtgttctcgggtatggattctaaacctaaaatttatttgtgtctcccggctacatgctatattgaaaaaggttcgattaaagatagcgttatagttcatggtgtaatccctcgcattagggaggttgcagagaaaaaccgtcttgaaatagtcgacatgcatgccgcgacttccggaatgcgagaacatttccctgataaactgcatccggacagggtggcatctttggagatggcaaaatgtgcgtatagggcgatgactggaaattccaaagaattccagcttcaggatttccccggggtcaagactaaatggaggggttatgataaatatgatttcgagttcaacgggagaaaggctaatatagtagcccctgccaagcctcttcccggtaagccttggatttggaggcctgcttttttcggggcttttcctgctgtagatatcgcaatgctagcattgggttaccatgtagtgcattatgacttggcattcctttatggaagcccgagatctcaggaactcggaaccctgttttacaatgccatgattaagtattacggcttttcggaaaaagttgtccttgaaggatttagtagaggcggactctttgcagtcgattgggcagcagcaaatccggagaaagtatcgtgtatctatcttgatgctccggtgtgcgatattacgagctggcccagtcgtgaaaggactgacttatggcaggaatttctgcaggagtggaatatcaaggaagaggatatgaaaaatttcaagggtaatcctatcgacaatctgaaacctttggcaaaagcgaagattccgattatagctgtagcaggggacagcgataaaactgtgccttatgatgagaatcttgaaattttggcaacacgttataaaaaacttcggggagagattgaggtaatcatcaaagaaggttgcgatcatcatcctcacagtcttgacgcaccagctcctattattaaattcatattgaaccactaaaaaatgttccacgttgaatgcaagcggaatctagtcggacacgactggattccgcttatttgtaaatcaacatatttctgttcttcacgtgttaaaacgttcccgggaacgtttgcgatgatttatactataaaatgcttgtgtgttgatacttatgaacatatatttgtacgtgctcagtgagtgcgaaagacataatatataaccaaccattaataattaaaccccaaaatgacgttgattagaattacatggaaactgcttgttttgctcacagtcttaatctttgtcggaactctgcatgcagcggataagaccggacaggatgaatggcgattcgcaagctatggaaaagctgctaagggatctgttactatggattccaacactctgacaattaagacagagaacacaaaaaatgccttctttgaatctgatgaatacagttttgcatataaggaacagccgtttttgcatgacgattgttcaaagtctgtgataacggtgaaaattgacgatattaagaaaggttctgccggtattatgatgagatccactgatagtcaaagttcggcgaatgtacatcttgaagcgactgctactggagatttattcgttttttttaggcagcaggaaggaggtagtacctcttacagacgagtggggtatatcggttttcctgttgagataaggcttacgagacaagggaattcttttttgagtcattataaaaatgccgctgatgagtggattaaaggccctgctgtttttgtcgatcttggagaaacgcatttgtccggtttttatgcctgctccggaaatgacaatcaaataggctacgatgtggattcttctcgtaaaatgcaggtgacattcagggattggactattgaaaacagcgataattttatccctgcggaagataattttgtcgacaaggagccgattgcgccgaatactcttttgagagagaattttgcagatggtagtttatctaatgtacctgcaagtgttgtgaatccggtctggaacggtatcaaatttgcagaattgccttatgcagaagacggcagcagatattggagaaaacgtggcgatggtatatactatttaggcgacaagaaatgggctgattatgaagttgccgtccggctctcttttccggagccggctatgagtacttctgaattttcagtgcagatgcgttaccagaatatagcaatgtattcaaaaatgctgaaatattacggggtaagcctgaagaacggtaatgaaatcattctgaataaatacaagtcgggtgggaatactatagagccgctccaaaaggtgaaagtaaattcgtataacgacggaagcatgcacgaacttaggattcgtgtaatggataaggattacgaagtcttgtgggatggcgaaagcgtcataaaaggctcagataccaaagaacctataacctatgggaatataggtttgaaattcacggactgtgatattaacttataccgtatagaagtgactgagataaaagatgaaatcaatggaaatcttgataactatttgttggattattacgacacgaaaatccctgattatattattaaacaatatttgaaataatggaactgaataaaatatttttatctggattgacctttttatgggtttgttccggcaacggctattctgccgataggcaagatggtaaattcgaacctaagttgtttcaggtaacaactgcagagacaaggcctaatgatgcagtacttatcaggggtgaatatcttgacaagataaagtcggtaaaagtttttaccctcgacaatggaaatgtcggcaatgccgagcctgcgtatgttccgctccctgtagaggacaggctgcccgatgtaaatggtaccaaccttcgtaccgggccgttggcgtcctataaggctaaagcggtggacttgctgcagcaaaaggagcagtctcttaagtttattgtacccgaggatttgaagaacggggttttcagtgtggaaatgacagatgtcaataatgaaaaggcttatttttatctgaacgttccgattgtccgttgggctttgagcgaggatggtgaatgtgcggttgccggagattatctcagggttcagggaaagaatcttttacgggataaggacaaggcgcatgctgtacttgttccgctaaaaggcggaaaaaatgtaagatgcaaggttacggatttttttgacgacttttccgtaagtgttgatattccggacaacacgccattaggcacatattatttgtattaccataacggaatggggggaaagacagcatggagtgaacctttgcggatagatgtggtgtccaaatctcctgactggtggggggtgaaagtatttaatgtgatggactacggtgccgtgggcgatggcgtccataatgaaaccgcagctttccgtgcagctcttcatgctgccggacaaaatggtggcggtaaggtatatgtgccgagaggcagatatatgcttacaggtgagctcattctttctccaaacacattgattgagggagaatcaaaggaactgactcatattttctggaatcctcttaattgggatttgtatgagttgcctaacagccttattagcggaactcatcatttcggtttgagaaacttagtaatgtggtcttcacgtgcatggggagtcatcatgtctacggggcccgtggaagaacaaggaacgatattgctcgagaatctgattgtgcgtcagacagggcagctcagcggtatgatatatcaggtgaagtcgaatagggatcaagtcgaagcggagtttcacagcagatggagcaaaacagggataattcttcgtggcaagaatcttaaagtaaggaattgcgtcttcaattcagccggcatgtacactttctatgcagcgggaggatttgtccaaaattgccgtttcgagagacataccacaggtactaaccaaccatatatgctggtacatcccaaagggttgatattcgaagattgttataagcagggggacggttttgggtatgcttcaagtattgacgaaagcaggaacctttatgaagcgcgcaattatattccgttcgattataccaatgaccgcgagtgtatgactcttgatggtggtagtggcggatattacggacctataaaatccgtcgagggtaatataattactatcccagaagatgcggaaactaatcaatggactgaaaaccactggaatggcggaggagtctatattattaacgggacgggagccgggcagttcagacgtatccgcagccatactctgacaaaaattgagttggatcagccgtttcttgtacaaccggatgccacatctgaaataagtgttaccaccgtaaggcatcatttgtatttcattaataatgaggcagtcgatgtaggagcttatcagttgtatggctctgtacagaattgtgtgatttccggtatgacgatgacacggtgtaacggaattgtaggcagaggatcgctgttgtatcgggggaaacagcctgagtggtatatcgatatcgtcaattgccgtcttaaggagggtaattacagtcattggttcggtattgatgacagagggcattccggtcaccaaagtataaatctaatcggcagcggaggaactggtatgagcataggcactgttatcaggaggaatgtgcttagtgaatatagttatatccgtacttccccgggagccaatccggatgcagtaacagacgttataatcgaagacaactcgtttgatatcgcaaagaatgccatattgttgggtggaaatgccactaatacgtctggtgttctgattcataacaacagatacaatgaggtagacaaaagattggaaaccaatgttaataaagatagttaccttgtcatcgatgacaacctttgaggatatttttccgatgcggacgacctttgaggataacaaagtttctaatcggggtccgataatacgaaaacgattatgataataaagaatatagcgaaaaacagaacttttacaaatgtagtattgaatgcggactatgtggtagctggaggtggacttacgggggtgtgcagtgcaattgccgccgcccgtgaaggacttcgggttgtccttatacaggatcgtcccgtacttggaggcaatgcttccagtgaagttcgcctttgggcactaggtgccacttcacacatgggtaacaacaaccggtggtcacgtgaaggaggtatcatcgacgaaatccttgtagaaaatgtataccgcaataaggaggggaatcctgtgctttttgacatggtgctgatggataaggtattgacagaaaagaatatcaccttgcttcttaacacaaccttatataaggttgataagagcaatgatcggaacatatcttctgtcacagctataaattcgcagaacgggacagaatactctatttcaggacagatgtttgcagactgtaccggagatggtacgttaggttatcttgccggagcatcattcagaatgggggcggaagacagaactgtgtatggtgaagaatttgcaccagacaagcaagagtatggagaattgctcgggcacagcatattgttctatatcaaggacattggcaagccggtggaatataccgctccaaactttgcgttaaaggatgtcgaaacattgataccgaagttacagaatccaaattatttcaatgtaaatcaattgggctgtaaatattggtggcttgagtatggcggacgcctcgatactattctggacacggaggaaatcaaatatgaattatggaaagttgtctatggtgtctgggattatataaagaattccgggaaatttcctcaggcaaagaccctgacgcttgaatgggtggggcttttcccgggtaaacgtgaaagtcgcaggttcaacggtctttatactctgacgcagcaggatgttatcaaccagtcaatccactatgatgcggtggcatatggtggatgggcaattgatcttcatcctgcggatggtgtgtatgctggaggaaatggctgtcatcagtggcacagcaaaggtgtctatcagattccttaccgttgctatgtaactccggaccttgataaccttttcgtgggtggacgcatcatttcctcaagccacgtggcaaacggtactactcgtgtcatgtgtacgtcggctctcggtggagaagtcattggacgtgccgcgtcaatttgtctttcaaaaggatataaaccaatagaccttgttgatagggacaggataggtttgttgcaatcactccttgttaaaaacgggaactttataccaggtattgctgtggcggttgaggacaatcttgccgactctgcggaaatatcggtgtcatctgtgcttgaacttgacgatttgccagccgacggtacctggtttggattagattatcctatagctcaactcataccggtgaatggtaaagtgccggtggttaggatgaatgtaaaggcagataatgcaacaaggcttgttatggagttgagaagttcatccaagagtgagaactacactccggatactattgatgcagttctagaattcgatttgaaaaaagatgagaatgagattgttgcagacttttcctattcatacgcgactccgcgttatgcttttatctgcctgatgaaaaatcctgagatttcagtaccgatgagcgggcggttagtcacaggattgactgccgtatataactacataaaccctgccgtgtcgaatttcggaaagcaggttccacctgaaggaataggggtggaggaatttgaattctggtgtccgaaacgtcgtccggagagcaagaatatagcgatgtcgtttgccccgcctcttgcgtctttcaactcggaaaatttgaggaattcttattaccgtccgtatataggtactaatgcctgggtagcagctttcgatgatgcaagacctgaagtatgtttcaagtggaatgggaggaaacaaattaaaaccattatcttgtacttcgataccgatacggatcaggcaatggagaccgtccagatggggcatttcgatgcttgtgtcccgacttgttacagggagtacatagtccgggattcagtgggtaaggaactttatcatattactggcaatcatcagacactcaatgtgcttgaacttgatcagccggtgacgaccgacgccatttatgtcaactttgtccgtccttgcggtgatgtctgcccggggcttatgggagtgtatgtgtgttaaggtaacattgataataaataaactgaaatgaatatacttgattacataaccattatcctattttcgataggagtgttgattacaggagtgtctttttccaagacgggaaaggatatgaaaagttttttctcaggtggcggcaacgtaccgtggggaatgagtggactttcattgttcatgggatttttctcggcaggaactttcgtcgtgtgggggtcgatagcctattcgtatggaatggtatcaatcattatccagcttacaatggctgttgccgggtatgccgtaggcacatggattgctccccgatggcatcgtacccacagtctcacggctgccgaatacataacgggccgtcttggtgtcaagacgcagaagacatatacctatatttttttggccgtgtcggtttttactacggggtcgtttctttatcccgtagctaaaatagtcgaagttactacgggtattcctctgaccacagctatcttcgctttaggggcattcagcatggtttatgttgctctcggaggtttgcgaggagtggttgtgactgatgttcttcagttcgtaattctttttgcggcagtagtgatagctgttccgcttgctttcgacaagattggtggagtcggtacatttttcgaaaaggttccggaaggatttttcgaactctttgaaggtgagtacactcccgggttcgtgatagcctttgctatctataatatgtttttccttggaggcaactgggcttatgttcagaggtatacttcagtaaaaacggaaagggattcacggaaaacaggttggcttttcggggtgctctatacaatcagtccgattctgtggatgttgatacccatgatttaccgagtttataatccgtcattgtcgggtcttgaaaacgaaggggcatatcttctgatgtgcaaggaagccatgcccgacggattgcttggtttaatgctcggaggaatgattttcgcaacggcgagctctctcaatgccactctgaatatatcggcaggtgtggttaccaacgatatattcaagagaatgcgtcctgatgcttctgaaaagacattaatgaatgtggcgaggatttccacatggggattcggaataatggctattattatagcgcttctgatacgctctatgggaggtattgtaaacgttgtaatcagcgtggcggcattgacgggagttccggtttaccttcctgtaatatggtctttgttctcaaaacggcaaactgcgcgtacgatactctcagcgacatttataagccttaccattaacttgatattcaaatttgtgactccgcatttcggcttggctctcgataggacatgggaaatgatagtcggtaccgcggttcctgtgatactgcttgccgggattgaggtggtgctgaaggcaaaagaattcatcgctccggaatatatggcctatatttcaggacggaatgtaaggatgcgtcaggaaaacgcaggcgatactgaagagtctaaacggactaacaggtttacacagaaagtgttgggcattggtctcggactgtccggtgtgcttattacagttctcggtttcattgcggaggaaaacattgtcgtacctgtcgctgttggcttagttgtgacattgacaggaatatatttgcttattttatcattgcgccgtccgctttagaagccttttaatttttcttcctattgatagcgtgggctcgatatgagcattatatttattcgattgaataatagaacatagcgataaaaatcttaagtttataatagcaaattataacttttgatcgattatcgctatgttcacagaacctaaagttatgattcaagctgtatctgattatcatcgattaaataaactccccgttttcgttgatctttactttcacttccttttcgccttgctccaattctatccagtagtagtttccggtaggagtttcaacatattcggcatcatccactacataaccgctatattgtgaggcattaatggcctctgtcactttaatcgggagtacatatacatcccatgaggttgaaatccattcatagcttgtgttgaacaatacttctttgctttggttttcatgtacgatgtccacttcgatcatacctttttcctgttcaatctcaataatgcgggcattgggataattcttctgtatgaattccgttacggcagtaaccgtactcgacggggcatccggtagcaatgattcgttattgccatcaccgtcatcattcacggctttaatgaggatgccgtctgctgaataatgcagatccatatctacatcctgtgccgattccacttctatgatgtagatgatctctttctcagttccggcacgttcaatacgctccacttcgttatctctcttccaggaggcgtattcgctgctttcaaaagaggtctttattgcttgcggaatatcgctatatggcatttcagtttcagtcatgtaccatgaaccatctgccgtataccaggcttccgttttatacccgttgtcgctcttgttgttgaattccgctttgtagtattgtccttgtgagacagtttttgtttcccaactcagattagcggtgttggagaaactgctgtcgaatgcattgcgtacggcttcaggaactttagagtttggaagatcgtcatcatcatcgttgcaactttgcaggcttaacatgcccatcgccaatagagctagatacattttcagtttcatagttacttgtttttttagagtttactaatattattgttttctttgactattgctgattgtattgcaaagatggcgggcaattctggaagaaattgggaatttgactccaaaagtggataataaattctatatttgcgattttaacattaaaaagagcagattactaatgaacttatactaatatggtacaggaattggaaaaacgcacccgtattgacgtagccgatgtgctgcgcggactcgccgttatgggcatcattgtattacattccattgaacactttaatttctattcatttcccgatacgagcactcagagcgcgtggcttaacttttcagataaagccatttgggacggactctttttcatgttcggaggaaaggcttatgctgtgtttgccctgctttttgggtttagtttctttattcaggataataatcagcgtatgcgtggcaatgattttcgtttgcgtttctgctggcgattgatattattattcattcttggtaatataaatgcggcctttttcacggctgaagtattggtgctctattctttagtcggattcattttaccacttacctgccgactgaaagataaatggctgtttattctggcatgtgtgcttctgatacagccattgccactttattatgtgatacatgcctgtgtagatccttcttttgtgactccttctattccgacaggtagttactggggagcggctttccaggtgcagagtcacggtacatttcttgaaaccctgcgtgtgaatttgtgggaagggcagattgccagtcttgcatgggcttgggaccatggacgtgtgtttcagactgctgctcttttcctgttcggcttgttgataggacgtcggggacttttcctgaaggagaatctgaagttctggaataaggtactttgtggtgctcttatcgcttttttccctctgtatggattgggcaatatgttaccggatttcattgctaataagtctattctcacccccttgttacttatcataacttccctgtccaagtttgcatttatgctgatattggtgtcgggtgttatctttgctttttatcggacaaacctgcacgactggttgatgaagattactccttacggtaagatgagccttacaaattatattacccagagtatcattggttcgttgttgttctataattggggacttgcgcttcactctcagttgggtataacagccagtttcctggtaggagtagtgctcttcatcgtgcagcttgctttctgccggtggtggatgagccgccatgcgcacgggccgctggaatatttgtggaagcgggcgacttggttgaaataaagtatcattttacacccgctatttttgagaaaatgttctttccgttctttcagatctctctgaattccctgttcatcggcattacggctgaaacttccaaccttatagttgcttcaggtatctttcagctgaaacaccgatgaacagggggaccgggggaaaactgaaggctgaaagaggaaaaagaacacttaaatgtattgaatagtatctgaaaacaagtaatgatgtgatccggaacaagtaatgttgagaatgattacattgcttgttcttatccacaacaagcaatgtaatttcaggcaagtccgattccatgacttttaacgtctatatatcggtggcgttggatatatagatactgcacgttcgatatatagatgcgacacgtccgatatacagatgcaacacatccgatatatagatgtgtcatgtccgaatttgtgccagagttttgacctcttttaggcaaaaatgctgtttgtaaacagcaaataggctatgcttattggagaacaactggattattctctcagggaaacttctatttgcttcttatcggttatccgaggatactaataaatacttcagttcttccaattgataaacacttggcatataatgcccgttgatgacaactgccggagtatggctgatgttattccgttcgcaatactcctgctgttgcctccagagcaactgtgccgtatcgttgagttcgtatttctccacgtccggtatctcctgaacttcaaaccatacttccagcaagtaaatagccctatcccagccttccgagaggtatgcggagaggatggtttgtgctatgtgtacgctgagccggtcattggtatatatgactaaagagatggatatgtctgctgatatttcccggatatggcgatgtactttggcgcatgctttacaattggggtttaccactaccattaacctgtcttttgtgctatcggcagagttatgcagagctatatccgggtgaatcatcgttctgactttaggtttcaaagctaggagtttctgaaaagtgatcggattgagcagaccggatagcttgttttttagaaagtgtttctctttgtccgaagaaacaagtgttttagcctgtatccagaaaatcacgcagatagtgctgactgcaatcattgagaaaagaattcggattgaaaacctccattcgaaattattccttatgatataaagtgctacggcagtcagccagaccgagaaggtggtgagcatacaaaacaggcacgctttacgaataaagaatatctgatatatgacggagtacaaggtgaatgcaattgcaatgaaaacagacagggctgccagaagatggaattcctttgggcagacagcagtgaaaaagaacatggttgtgaaatacatccatgataattctccaatacctattcctgcaatatttgcgcctttggatttgagtacctcattacaatctataaccttccctatgtggcagaagcggtgtagaaagtgattatctaccatttctctgtatagaatgatagtagaaatgagaataccacagaccagcgcggaaagataaagtggtaatcctgtggggtagtttctactccagattgaagagaaaactaagaggacggatataattcccgcaatcagtatcctatgttgccggcacatataatgaatattgctgagcaagcagtgagattcacagactgttttcgaagttgtttcaccaaacaggacagttcctgtccactggtgcgcaaatagctttctgcttatgggcatgtggctaacttcggcagtcgtgatgatgagccggtccggttctatcttttcgacaaggcagaatgtggaatggcttgtttccaattgggtgataaacggaccgtgtaacttctccagatacttcggttgaagttggtaaactacgttatttacatgaagtgcgtttaaggcatcgctgataccttgcatcgtgttgcccaacggactgtcgagcaaacggcatacggtagtcctgctcacttttacggtcagtgaccgtaaaaagtgatggactacttcactggtggcattgtcaactcccagcatagtcttgatttatagttaaagtttaggttaggttctttgttaaagtgtaaagtatccgctcaaccgggcttctcccagttcaatttccagatagtattctcccggctctgttgcgtttaattcaatagtgattagcgtaggattgatacttgttccggaataaacatttactccggaagcatctgtgattgtaatacttgcagtaggtgcatcacagttgaaaactacagtgactatatcattattaatataggcactggcgggttgaataatgatgctcctggctacaggacccccttcttctgaaccagatgggaatagaggaatctctctttcatcatcatcggtcagaaaaaaattctgggcgtgcaaagatgtgctacccataactactgctaatacgaaaaatacaaataataactttttcataagatatacttttaatttgttatgacggtggcagatttagagagaatttatccaataaaagtgtataaaaagtgtagaaatgtaggggaacatcttgttatcggaccattttcccttatttttatagaaattgttctaggaattctcggagtgagattgatttatcagtgcatttcatcttttgttccagtattcttttgccttttttatatatggcatctctactgcattccattagatatctgaaatggctggtgggtatgtctgttaaatgcagacaacaaaggtatatctcgtcctgagacaaaggatactttgcagccaagcggatggtaatgtcattccagcgtatatcagtttctgctatcaactgtttccagtcttcttcatcaaaacgctcattcgatttatcggtttttttatatgattggatgatacgtttcattttcacacacacttcagaatgctcataagattctttcaataatgcttgccgttctgtttttaagatgtgtaattcttcctttaaagtttgcttttcagtttgactatagtggtgtagtgctatctccttttgtagaaaactgatttgctcatttttctgtcggagcacttcttctaactttttgcccatttctatttctttttgtttgtaatagatcacttttttcttgtagcactttaataatacaagaaataatgcaagaaaaaacgctgttcctgtggttatataataataaagttgtcctaagtttgttttgaactccgactgtttgcgctgtattaatatatttttctctgttgtgacgattgcagcaccttgttgcttttgttgagcactgtccaggtaggcggaatattttctttccatttcgagtgcttgttctaattttccttgcttttgggcaatatcggccaaacgcatataaatgcctgctttagtggagtggtctctgctgtatagtgctttattgagataaatcaaggcggaatcatattgaacggttttgtaataagcatctcccagaagtaaatatcccctatacaacatttttacattatcttggttgttaagactcaatttagcaaattctacggcttcttttcccatattcatgcgcccatatagcagacttaatgaataagctgttttggccatcaagtttctttgagcaatgtggcgtgatattttgaatgcaaggagtatcttttgttctgcttcactatagtattctttccctctgttaatgtcaatcatgcctcgttgtgataaaacatctgccaaaagattcgaatctttttcttgaatggctaatctttctgtaatttgatagattgaatcggcttgttcgttcaatctttgtaataaatataaattagcaatattgttgtatatgtatccagctaatttattgtcagaaatgctttgggcatgagtaatggctgtgaaaaatttctttaaagcttccggatgattgttttgatctcttcgaatacatccccaataataatatgattttgcctgcataggtatatctttaatggagtcatagtattgtactgcaatacgtatctgtgagtcttccgtttgctgtatgaaattcttgtctttgacttctgtcaacagtagtgcatgatatgctcgatcttctaatgagttaagttcttccggtcgaattttttgtaaaaaacgtaaagcgctgtccggaaacttttgcatgagagaatcggcttgtacaagttgggcgttcggactggtacgagtacaagccactaatatgcaatatgcgagtattagtatggctaaggtgttggatttcattgatttatcatttgttgttgcagcctgcaaaagtacccgtttctaatgataaaacaatgtaatgtcagtctgtaaaataagtacccccctatttatgaacttgagttcataaataggggggtattgaattaaagtatgtttttttgtcaggtatgtaactccagcacgaagcggcagcccttggtatagctactgtccaatgtcaggctaccattcatttttgtggcaatcagagagcaaatgggcaatcctaaaccatccccttctgtaaggtctttcactttagtgaaaggtttgaacaagtctgcttgttcctcctcggcaataccacttcctgtatcactgacaatgaattggtgggtgtgtgctccgcgctttttaaagtctaaccagattttaccaccttcaggggtaaactcggctgcattattcagcaaatggagaagaatacgttcaagttgctccggattggtcttgacactgagtttcggagcattcacggcagtggctatgtctggcttcagaccgctttttatcttatccataacactttcacagaaagtgttgatattgatttcacgcatttcgtatgcttcagagagcgtgctttctaaatcggacaactcttgaatgtgctcagcaaagcctttcagtgcacggacgcccggtaaggtagtatctagagtattcagtgtcggctccatttgtgaggagatattctggataaacttagttttcagttcattgtgctcattggctatctgtatggctttcttttgtttccgggtaagaaggacaaaacgaagcaatacgataccggctaataccagtgcggtggccagtagtccggcaaggatgcaaagtccgatgataatgtactgcttggcggatagtgaactgtctttttcctcaatagttttcaggctatcatcatatttacgtttcagcacgtttagttcatcttgggcggtaagggcttttaccgagtcgctccaaagaatgtatttgtcgtacgtacgggctaccagtccggcattgtttgccttgcgggcaatatcgatcaaggttttgtatgactcgtctacctttgcataattcttctgttccttatattggctgatcagacggttgatataagcatctccttgtgagttcattccaaaggtatagtagtaattggcttgggtgtaaagcaaatcattgttgagtgaatcatttttggctgctttggctgtctcttccaatttgaccagttgttctttggcacgggcaggattcttgaggttgatatacatttgcaggcgttccttattgatacggaaacgcaggtcgggcatcgtcttgccacttttctgctcaccgtctgtaaccaatagttcggcaccgcgtaacagttcaaaagcttctttataatagttttcccgatggtagagagcactggcgttgacaccacattctactgctttatcatactttgcctgagaggaaaaagcattgtaagcctggaggaaaagatagcgggctttgatatattctttttttgcgagactttcctgtgcttgtttcattagttcatcggcacggttctgtgaataggcttggctgcaaatgcagaaagcggctaagaagagtagggtaattatctttctcatatatgattcattttatttgcttacaaagttaagacattcttctgtaggttgtacaagaaaagcgcttaaaaacttgacttatctcatttttctgttgattagggtacatggaattatatactgttccgtatgatctccgtatcttctccgtgttatctccatatcttctccgtactcgctccgtacctccttcgtatctatagagtacggagcaactacggagcgggtacggtgcaggtacggctcgggtaggacagatggcaaggattagtatttgaaactgctccctcccaggaactcacgcagaagtgatgttggcgggatttccttatcttgtaccggagtaaagtatttgatgaatttcagcaaccggtatgcttcggcatactccggacaattgcgtgggacgctggtcagtatcggttctgcgtggcaacgcaatacggcaaattcaaacagtagtgcggagttgaacatcacatcggcgttctcctggtaagggaagatccatttgtcttctccggcacgcacgctgggccagcgggagatggtttcgcgtgccgaatatccccgatagttgaagtcgcggatgatacggcgcaacaggcggttatccgttgtgggtatccagttgtggtcgtccagagaaatggtagtcagggcagatacatagatcttatatttgttttctgccggtatctgcggagtgagttccgggttcaatgcatgaataccttccagaatgaggatggtatgttcgtcaatccgtaacttgtcccctttgtattcccgttgtccggtagagaagttgaaactcggtagatcaatttcttcgcctcgtaacaaagctttcaggtcttcctcgaactttttgagatcgagtgcatacaacgattcgtagtcataatctccgttagcgtctctcggagtgtcttcgcggttcacaaaataattgtccagggcgatggggtatgggcgaagaccatttgtcataagttgtacggaaagacgcttgctgaaggtggtcttacctgaagaggacgggccggagataagtaccagttttacgcggttgccattttcgccccgattatagatatcatcggcaatctgagctatctttttttcttgcagtgcttctgctacgttgattaaatcagtggcatgtccttcttcacaggcgaggttaaagtcaccgacattgcttaatcccatgatataattccaacgcagatgttccttaaatacatccagcattttttcctgcttgacgacctcttccaatacattaggattttgcctgttgggaatgcgaagcaacagcccatcgtaatatttcacaatgtcgaacagccagataaagccggtgctgggcagtagattaccataataataatcaatcgtatcttctaatgaataataataggtatagatagagccggaagtttccagcaactttactttgtctgtcatcccccgttcattaaagatgcgcacagcttcagttgtgtgacattccgtgcggcggtatgtgatgtttttgtctatgatttcctgcatgcgctttttaatggcggatacatcttccagcgtaattgtgcgcccaatgcgcaagttgcagaagtagcctttggatacagggtgttctacaaatagtttgccgtccggaaacaattcgttgacagctttgtacagtacaaagcaaagactgcgcacatacgtccgcaaaccggaagagtcacgtatatcgaggaattctacatctttattattgtatacccggaagttcagcccttcggatcgattattaacttttgcactgacaacctgataggggaaattaagattaaaaccgtaataaatatccaaaagtgaactcccgatggggaattctttagaaatattattatttttgcaacaaatttgtaacatgtgtttcatgacgtctcctttttaggtgattaatacgttaaatatagatataataacagatgtggcataaaaccttctaattaattaaagatggaatattctttttatgattttttaaagctgcttggctcgctggcattattcctgtacggaatgaagataatgagtgaaggacttcaaaagtttgccggtgacaggctccggaaaattctaacggcaatgactaccaaccgggtaaccggtgtactgacgggtgtgctggtcacagcactgattcaatcctcttccgcaactaccgttatggtagtgagttttgtaaacgctggactgttaactttatcccaatccatcggcgtaataatgggagccaatatcggtactaccgttacagcatggattatttcggcgttaggtttcaaagttgatatagccgctttcgcacttcctctactggccttcggcattcctcttctcttttctcaaaaaagtcatcgtaagtctatcggtgaatttattttcggtttctctttcctatttatgggactttccatgctgcaatccaatgcgccggatttgaaagcaaatccggaaatgttggcctttgtgcaaagctataccgatatgggatatatttctattctgttgtttgtgtttatcggtactatcctgactatgattgtgcaggcatcggcggcaacgatggcaattacgcttatcatgtgtgctaatggatggattagctttgaattgggggctgcattggtattgggagagaatatcggtaccaccattactgctaatcttgccgcattgaccggtaatacgcaggcgaggagggctgcattggctcatttggtgttcaatgtcttcggcgttatctgggtactttgccttttcactccgtttacgagtgccgtatcttggtttgtggaaaacgtgatgggaacgaaagatcctgccgtagctgtttcatttaagttatcggctttccatacttgctttaatatctgcaatgtattgctgctgatctggtttgtaaaactgatagagcgtacggtttgtgccatcattccgcagaaagaagctgatgaggaatatcgtctccgcttcatttccggtggcatgctttctacagcggagctttccattttgcaggcacgcaaggaaattcatctgtttgcggaacgtactcaccgtatgtttaatatggtacaggacttgttgcatacggataaggacgatgattataataagctgttcagccgtatcgaaaaatatgagaatatcagtgataatatggagttggagatagccaattatctgaaccaggtgtctgacgggcgtttgagttcggagagtaagcttcagattcgcgcaatgcttcgtgaagtaactgaaattgagagtataggtgatagctgttataatcttgcgcgtactatcaatcgcaagcgtcagactaatcaggacttcacggaaaagcaatatgaccatattcactttatgatgaaactgacggatgatgcgttggcacagatgattgtcgtagtggagcgttccgaccaccaaagtattgacgtgaataagtcattcaatattgagaatgaaattaataactatcgcaatcagctgaagaatcagaatattctggatgtgaataacaaggaatatgattatcagatgggcgtttattatatggacattatcgccgaatgtgagaaattgggtgattatgtggtgaatgtagtagaggcaagtagtgatgtaaaagaaaagaaagcgtcctaggacgctttctcaaattcttcttttccaactccgcatagcgggcaaacccaatcttcaggaagatcttcaaacgatgttcccggctcaatgccattttccggatcgcccagctcagggtcgtaaacgtagtcacaaacggtgcaaatgtacttgtccataaaactattttttaggttttctgtataaataacaataaatcccgcctttttgtttccggttttgctttgaaagagatatatttgtttcgtatttattgtaaatgaactctttatgacgatactaattctggtcggtatggcggtgcttgtaggagtactgttattatatgtatttgaacttggtagaagtagacgcctgctgcttaaagcaggaaatgccaggaaagcattacgcggttccgaagaactgtttcgttctattatgcaaaatgtccatgcttttattcttttgatagatagggattttgtagtaacccggacgaattactatgatatcaccaaagcccgtaagccggaaggcagattggctcgtgtgggagatttattgcgttgtaacaatgcattgtctgccgaaggcggttgtggaacacatgaactttgcggtaattgtcctatccgaaagaagattgaggaaacatttcgtgctaaaagtagtttcacggatttagaagctatactcgatatacgggataggagaggcgaagtatcggaatgtgatacgtatgtttccggtgaatacatggaaatagacgataaagaggggatggtaattactgtgcatgatataacccggctgaagaaagcagaagctgatttgaacagagcccgtgaaaaagcggagaatgcagatcgctccaaatcggcttttcttgccaatatgagccatgagatacgcacaccgttgaatgccattgtcggtttctccgaattgctggcttctgccggtacggaagaggagaaggcgcaatttctggaaatagtgcattctaacaacgagttgttgcagcagttgattgctgatattcttgacctttcaaaaatagaggcaggtacattggaatttacattctcggaggtagatgtcaatcagttgatgtttgatatagaacaattgtttcgtatgagactggaagataaatctgccgttattcaaattatcagggaaacacctcccgatgaatgtgttatgtataccgatagaaatcgtttgcaacaagtggtttccaattttatgaccaatgctgtgaagtttacagatgagggtagcattacttttggctataatcgttgtgctgaaggtctttatttttatgtgaaagataccgggaacggtatcccgaaagataaggttggacatatttttgaacgttttgtccgggtagaacagcataagaaaggtaccggtctggggctggctatctgtgaaatgattatccgtaagttgggtggaaagattggtgtggagtctgaatacggtaagggatctacattctggtttaccctcccgattaatggacgccagataaaggagcaaggcacggagattgatggcaagactaacttataaaaagatttaataacattcgctatcccaaattaatattgtatttttgcggctcttaattaaagctaacaatttgcatgactgcaatgaaggatgatttttatcatggcggacttactgacgacgaagtaagaaaaagccgcgaaaagtacggagtcaatctgttaacaccccccaagcgtccctccctgtggaagttatatcttgaaaagtttgaggatcctgttgtcagggtgcttttggtggctgcactattttctttgatcatctcgatcgtagagaatgaatatgccgagacaatcggtattattgccgccatattgttggctacgggaatcggtttcttctttgaatatgacgccaataaaaaatttgatctgctgaatgcggtaaatgaggaaactttggtgaaagttatccgtaatggtcgtgtgcaggaaattcctcggaaagatgtggtggtaggagatattattgtcctggaaacaggagaagaaataccggctgacggtgaactgctggaagccatatctttgcaggtgaatgaatcaaatctgaccggtgaacccgttataaataaaacaactgtagaagcggattttgatgaagaagctacgtatgcttccaatcgtgtgctgcgtggtactaccgttgtggacggtcatgggacaatgcgagtgctcagtgtgggcgatgatacggaaatcggaaaagtggcccgacaaagtacggaacagagtacggaacctactcccctgaacatacagcttaccaaacttgccaatctgattggtaagatcggtttctcggtggccggactggcatttgccattttctttattaaagatgtaatactggtatatcctttttcaaccttccacacttttgcagactggcttccggcattgaaagctaccttgcaatactttatgatggcagtaaccctgattgtggttgcagtgcccgaagggttgccgatgagtgtgacgctcagtctggcattgaatatgcgccgtatgctttctaccaataatctggttcgcaaaatgcatgcttgcgagacgatgggggcaattacagtgatttgtacggataagacgggtacattgactcagaatctgatgcaagtttatgaaccgagcttctatggtttgaaaaatggtggagaagtcggtgaagatgatatcagcaaactggtgatagaaggtatcagtaccaattctactgcttttctggaagaaatagccgaaggtgaaaaaccaaaaggagtcggaaacccgacagaggtagccttgcttttatggttgaatagcaggaatcgggattatctggaattacgtgagaatgctccggttgtggatcagttgactttctctaccgaacgtaaattcatggcgactttggtgaagtctcctttgatgggtaagaaggtattgtacgtgaaaggtgctcctgaaattgttttaggcaaatgtaaggatgttattctggacggcaaacgggtagatgcggtagagtatcgctctacggtagaaaaacaattgttgggttatcagaatatggcgatgcgtactcttggttttgctttcaagatcgtggaagatacggatacaagggattgtgtggaattggttgccgatcatgatttgtcattcctgggtgtggttgctatcagtgatcctatccgtcaggatgtgcctgcggcagtcttgaaatgtcagtcggccggtatcgatatcaagattgttacgggagatacaccgggcacggctacggaaatagcacgtcagattggtttgtggaaaccggaagatacggaacgcaaccggataacaggggctgcttttgctgatctgacggatgaagaagcactcgaccgtgtgatggatctgaaaataatgtcgcgtgcgcgtcctacagacaagcaacgtctggtgcagttgttacaacaaaaaggtgcagtggtagccgtaacgggagacggtacgaatgatgctcctgcactgaatcatgcgcaggtaggtctttctatgggtacgggaacgtctgtggccaaggaagccagtgacataaccttgcttgatgattccttcaatagtataggtactgccgtgatgtggggacgctcgctatacaagaatatccagcgcttcattgtcttccagttgactatcaattttgtggctttgcttatcgttttgcttggttcgttgataggtacggaattaccgctgactgtaactcaaatgttgtgggtaaatcttattatggatacttttgctgctttggctctggcttctattccgcccagcgagagtgttatgcaagagaaaccgcgcagtagcagtgactttattatttcgaaagccatgcgctcctatattttaggtgtaggtggtgctttcctgattatactaatgggaatgttgtattggtttaatcatgccgagggcggtatgacaccggaacgtttgaccatattcttcacatttttcgtgatgctgcaattctggaaccttttcaatgcacgtgtgtttggtactacagactccgctttcaaagggatttccaaatcgtatggtatggaactgatagtacttgctattttagtaggacagttccttatagtacagttcggtggtgccgtattccgtactgtgccgcttgatttagtcacttgggtgattattattgcttccacttcactggtattatgggtgggtgaggcgatacgtttcatccgacgtttaactcagaaataaaatgaaagaaaaaggaattaaaaaccttattatcgattttggtggcgtattgattgacttggaccgccagcgttgtattgagaattttgcaaagttaggcatgcccaatgtagagactatgcttgatgtttgtcatcagcaaggtttcttcttacagcatgagaaaggactgattaccagtgcggagtttcggaatgcgattcgtgagcaaatagggaaggtagtgaccgatgcccgtatagatgctgcctggaatagttttttgggaagtattcctacctataagttggatttgttgttgaaactgcgtgagaaatatgtagtctatctattgagcaacaccaatgaaattcactggaaatggtcctgcaagcatgcttttcactataaggctttccgggtagaagattattttgagagaattttcctttcttatgaaatgaagatggtgaaaccggacgttgccatttttgagaagctgttggaggaaacaggcatagatccgaaagaaactttctttatagatgattctactgagaattgtcgcgtggcggaatcattgggcatttctacctatacgccgaaagcatgtgaagactggagtcatttatttagttgagagttgagaattgaaagttgagagttaaaatgcagttgcttcgtaacataccggaagtgcttcctcagccttgtgttgctaccataggctttttcgatggagtacatcgaggacatcgatacctgattgaacaggtgcgcgaagtagctgccgcacatggttttgcttcgggggtggtgacttttcctgttcacccgcgcaaagttgtacagccggagtatcatcctgaactactgaccacttgtgaagaaaaggtttccttgctcgccgaaaccggcttggattattgcatgatgcttgattttactcctgacgttgctattctttcagcaaaggagtttatgttgttcctctacaatcattataatatacgtgcccttgttataggatatgatcatcgttttggtcataaccgtagtgaaggttttgatgactatgtacgctatgggcaggagttggggatagaagttattcttgcacatgcatatatagataaggatgttgcagtaagctcttctgttatccggcaattgctgtcggaaggtaatgtctcggaagctgcttcttgcctgggatatgattatttcttgaatggcatagtagtaagtggttatcgtgtcggtcgtaaaataggttttcctactgcaaatcttcgggtggatgatccggataagttggttccttctgatggggtatatgcagtgcgcgttaccgtagcaggtcagagttatggtggtatgctcagtattggctatcgtcctacaatggctaacggtacggatcgtagtattgaagtgaatatatttaatttccattcagatatttacgagcaatatatctgcctttcttttgtccgctatctccgtcctgagttgaaatttgattccatagatgaactgattgcccagcttcataaagataaagaaatagcttcccgttatctttaatatctccttttctgtttatatttcttgtatgattatcgaaaaacgtactttttttattgtttttcgataaatgttttctgttttacttgttagtctcaaaaaatacctttttatttgcatatcgaaaaacgataaattattattgaataacaaaacatataaaggttgacgattatgaaaaaggcatttatgagtatctctttattagtgatttccctctccatgttgatggctgttctttgcggtataggagctaccgtttgatgatttgatagagaaaatatatctttgtaaactctaaaggacgacaacgatgaaaactgcaataaaactggctcttatttacttggcgatgcaaattctcggggcattggcagtggggccattcactatgatctatgcgtatgtaaaatacggtactgtagacagagcaagcgaatttgccttggctcccactctgctggcaggatttgtttttatgctgatttatttgtggcaaaaaggctatttgacaggagataagaggttatactctccagtgtctgtatcttatttatcctggagtgctatgatgggaatttccatgatttatctgattgattttttaatgtcccatctcacatttttgcctgactggctgagcgatacttttgatttattgcaatccggttggttagggattatttgtgtagctatattgggacccattttggaggagctactgtttcgtggagcaatcactaaagttcttctgaagaagtataatccgctagtagctatcttaatatccggtctgatattcggtatctttcatatgaatccggcgcaagtggtaggagctacgctgatcggttttattcttgcatggatctattataagacacatagtctgataccttgtattctgattcacatcatgaacaacagcctttctgcctatcttgctcttaaattcccgaatgtggaatatagcagtgaattaattggagaaaaagcttatctgacaggtctcgtaattgctttccttttgtttatattgtcctggagaatgatgaatacctataaattatctaatacaactactgaaatatgaaaaggagattgaatattctttgcgtgatcgtattgctcgtgctgggttattcggttttagaaactacttattatgtcggtttgggaattaaggccgggatcgagaaaggttttgactctaagattgatgcaaaggctaaagaagagatcagcaatgtgcaagtagtgcaactggtaccaaaagatttaggcggagatatcttgattgattctgtttataatgaaaaaaccggtgaatatgtacctgctgcttacgggcaaatgatagtcagtgtgaatacacaacccagtgttttatcaaggattgtttctctcctgattcttattttaaactatgttgccattgtctgggctgtagtactttttatccgtcttattgtgtcgatcaataaatccgatatattcaattggaagaatgtccggcgtctcagacgtttaggagtgctgcttattattggttttgtatgtaccttccttcttgcgtttttgagttttcataacgtggaaaaagtcttttcagtgacaggttattcattgagtatggcggatatggtgcatattacttctctggtattggggatttcagccctgattgtggcagaagttttcgctatcggactgaaaatgaaagaagaacaggaattgacaatttaaagaaatgatacgattatgaagagatttagaatattggggatattagcgatactggtgattgtcggagattttgccatttcttttactgccggttggcaagaagaacgtgacagttttctggcgggaagtaaaagtgcccgtgcggaaacgccagccttatacacgcctgaaggtatccctgtggaggtacgacctctggaaacaacaatattggattcattgcgtaatagtaaaatgaatgaaaaccttccttacaaaatagataaagtaagtgtggctattgttccgtctacttggagtaatattgtgttttgttttggtgcatttgctgttttggctattcttgccggaatttactgcctgatacgggttttaatttccatatcgaagcgtaatgtgtttactcatgacaatgtggtaagaatgcgcgtattcacttattctttattagcttttagcatcttgaatgcgttgatggaatggctgaattatattgaagtggtgaaacaagtgagtctgcccgggtatgaaataaagggtttcagcatgtccgaagattgggtatcattggtggtcattgttctctttaccgagatatttgccgtaggtgtgaaaatgaaggaagaacaggatctgactatttaatcctaaccttgataaaagtgatttatatgattatagtaaaccttgatataatgatggctcgacgaaagatatctttaggagagctggctgaaaaggtggatattacacctgccaatttatctattttgaaaacgggaaaggcaaaagctatccgtttctctacactggaggccatttgcaaaattttggattgccagccgggagatattctggagtatcaggaaggagaagaataaaatagcatttggggactgataggtgtttgtaaaagagagggaggatttggaatttctgaatcctccctctctttaattataactagtatctgtttatactatttgatggcgtatttgtccaccatatttatgatgatatacttgtatttgattgatatgcaatggtatgtcttataaatattaaaatgaatttgtctatcttgataatgattatttattgagggaagatgcctacatttgttattaataaatagtaaatggatgagaataaaacagaatagtattctaataacattattgtttgttctttcaatagggttaataataatgactagaaataactgtcaaattaatagtaagttaaaggaatgtaatctgaaactgctagagaaaagtattgcattgggctctgctgtttgggcaattactcaatgtcataaatacactaatgagagaattaaagatttagatctgatagttgataggcaaaagcgaccttttagtcttgaatttaatgatggatataagcttttctataaattttctctttcggattgcagtagctgtattgaatccgaattgaagaatattaagggaaaaatgaagtctgttaatattcttattgagactcaaagtttgagagattttaagacttttgtagccattaatcatattgacacagctaaggtatttcggatagaaaaaccaatattggaagaggcagaattacctttctattttgttacgaatagagaactatatattaaggatcttttttttccgatgtcagaattaccagatttgactactgaattttattacatagtacaagataaatatctgaattaatgtttaattttaaattttagttattatgaaaaagaaagtttttgttttacttgcaatttgttttatgttcgcatttatgcaacagtattttaaacagaactctgagttggcagattttattaattctacattggcaaatgtggagtctcttgcacaagatgagaccggacctgatagttggttgcaacctgacgatgtaagatgtcactataaaacggaagatggctgggttcatgttactacagaaacaatatgtgtgttttgtgctgtaccctattcctgtactcctgtaggttgtggaagtggatcttaaaatttaatcattatgaaatgtatatatgccgttatattgtttcccttctttcttcattcctgccaaagcaggaataagaaagaagacgcattgttttcgatggagaatattactagagcaaatttacaaactataacagtagaagtggaagatttcaattttgaagatttgggaaattttctagaagttacttcttatatccagttggctgcagagcctttgcttgcctccatacaggaaatacaaattaaaaatgagaagatctacatacatgataaatttgccagaattatttgttatgatatgcaaggtaaaatgatttttaagatagatgccaaaggagcaggaccaggtgagtatacggatgttaatacatttgttattaatgaacaaagcagggagttaattatttatgataatcataagcaatctcttttgttttataatgcggataatggaatatttttcaaaacacaaaagctcgttaagcctgatcctacagcaatggcttcgttggggggagtttattattatgataataggtatcatagtaactatccgaatgacactgatctatattattccttattagtctcaaaaaatgctatgactatggaccggcactattttccacacaatgatgctgaatcttcttatcgctttagacccacgaggcaaccattcagttataatgattcagtattgtattattgcagaaattttgataacgtaatttacgaattgaatccagatagcttaaaagctctatataaaataatgttgccggatcctttgccattttctaaaatagaaaataagataaatggatgggaattggtaaactcaaaatattctctgggattagaaagtatatacgaatgtaataatcttctttatttccaattttcaaaagatggctttcttcaatctgctctatatgatttaatccaagagaaacagatttattgtggtaaaagattgactgataaagttggtaaatcagttcctatctttcaattaattgatggagtttataaaggacaattctggggtgttttaaccccggaaactataggatatgctttgtctaaagagcccaaagattatcctgatatatttcgtaaatatgatcctgatacagataatccaattattgcgttttataaggttgttcaatgattgtatggaaaataactatgtattgtggaaagtctattccccttatcaaagcactattgataaggggaatatctatttatttactactatctttcgccttgaaagccaacgcatacatccgcatctgctttaccatagacagcaaaccattgctacgagtaggagagaggtgttctttcaatcctattttatcgataaagtagaggtcagcatttagaatctcatccggtgtatgcccggaaaggactttcatcaacaacgaaatgataccttttacaatcaaagcgtcgctttctgctttgaagataatttttccatcctcttcgtcggcttgtagccatacacggctctgacaaccttctatcagattttgttccgtcttatatttttcgtcgagcggttcctgctcgtttcctaagtctatgaggagttgatagcgatccatccagtcgtcaaagtcgctgaattcagtgatcacttcgtcttgtagttcattgatactcatgttgcagatttatgatttataatttatgatttatttttcgctgtagattacttgcattacagtttgtcctactgcttgcaatgtagctttatcaatggcatccatgtcatcttttacggtgtgccaatgctcaaagaaatctccttccggatagtaagggacgatatcgattgtcgggattttcgcatacttgttgatgaacgtatggtcatcggtcacgaaaccgccttttttttgtacaaaatggcgcccgaaacctaaagcgttggctgttttccagactttctcattgacattgggagctacttcatgagacaaaccttcataacggaattctgcatttttaccacctaccatgtccagcaatataccgaagcgtgcattatatccctgtacgtgcgggttgcgtgcccaatactgtgagccaagtccccagtattcctctttatgcggaccgttgtaagcctggtgtgttccataatcttcagcatctacaaaaacaatatcaatacccatttccggcaactgtttctgcaaatgacgtgctatttccaataatacacctacaccgctggcaccgtcattggcacctaaaatgggggtgtaatgctttttagcgtccgggtcagcgtctgcccacggacggctgtcccaatgagaaaaaagtgcaatacgcttttttgtatccggtttgtaggaaccgatgatattccgggcctttagtaatgtgccggtataggcaggtaagtctacatattggctagtaacctttgcaccgaattctgtcagtttatcagccagataattgccacaatccacatgtgctttcgtattaggaacgcgtggaccgaagtcaacctgtgctttcacatactggtaagcactgtctgcgttgaactgtggaacattgacgacgcttttggttgttgtttcagtgtcgtcgcttgtcttcttggtattgttgctgcatgctatgaatgcaagcaacaccaagcataaagggatgagagtataattccgtttcattctttatctaaattaaaacttagtttcacttcttttcttccggtctccagcgttacttccgctccgtttatcataggcaggttcatgctgacatgtcctaccggaaaattaaaacagacggggtaatcgtattctttcacgaggtcggcaattgcaccgtataactctttccccaaagacttgttttcctcgtattccgtaaactgtccgataataaggccggatagtttttctaatataccgcccagtttcagattgtagatcatgcgctctactgcatgcggacgttcgcctacatcttctataaagagaatggttccttcagcgggaatatcgtaaggagtgccgcgcagcccataaaatacggacaggttgccacctcgtaaaatgccgctggcagttcctttatggtttaatttgtgtccggggcaaatatagctgaaaccattttctgagatttctacagattctgctgtctccggattaaaatgtccaaagaggatatctttgagtgccaatgtgcagaaatcatcttcggattctaccgtcaaatggcgtgccatcagggcgtggagtgatgcaaaaccttctttctggagcacattatgtaatgcggtaatgtcactgaaaccaatcagccatttaggatgttcacgaaagcgggtaaaatcgagtttccctaacaggtgcactgctccgtatccgccacggctgcatagaataactttagccttttcatcatccagcgcattctgtaaatcttctacgcgctgtttgatgctgcctccatacgttccgtgtgagcttccggcatgtttagccattaccacttccagtccccaggatttcaaacgctttttggctcctttcaaaaaagacttgtctatcttgctggaaggagaaaggatgatgacacgatcacctttttgtacgtatgacggaaaaataaggctgttcataattcaatattttgcgtatggggacaaaagtacataaaataactcaaaacgaaatttagtttacaccacagattacacagattaacgcagattattacttttcaccatgattagaataaatctgtgttaatctgtgtaatctgtggtgtaaactatcaaaatgaaataaggcttgcgaaatttcctggagtgttatgctgcatttctcgacattttttcagatatttgctaaaaatctaacgttatggaacctattcgaagctttgatcaactaacctcacacttgaaatccttgaacaaaaggaaacgtattgcagtagtttgtgctaatgaccccaatacggaatacgccattgcccgttctctggaagaagggattgcggagttcctgatgattggcgactctgcgattcttgaaaaatatcctacattgaagaaatatccccagtacgtccgtacggtgcatatagaggatcccgatgaggcggcgcgtgaggctgtacgtattgttcgtgagggtggagcggatattttgatgaaaggtattatcaatacagataatttgttgcatgctatccttgacaaagaaaaaggcctgttgcctaagggtaaaatcctgacccatctggctgtaatgcagattcctacgtatgataagttgctgttcttctcggatgccgctgtaattccgcgacccactttgcagcaacgcatagagatgatctggtatgccatccatacttgtcgccactttggcatcgaacaacctcgcatttcacttattcattgtacggagaaggtaagtgccaagttcccccattcgttagattatgttaatatcgtggagttggcggaggccggagaattcggaaatgtgataatcgatggtccgttggatgtaaagacttcctgtgagaagacaagcggtgatatcaaagggattgcatctcctatcaatggagaagcggatgtgctgatcttccctaatatcgaatcgggaaatgctttttataaggctgtatccttgtttgcccatgctgatatggcaggtctgttgcaaggtcctgtatgtccggtggtgttgccctcacgtagtgattccggtctctctaaatattatagtattgctatggcatgtctcacttgtgcctgtgactaagtggcagggtgataaagtaggtgatcctaatcgtaaattgtaaatcgtcaaatcttaaattatgagaattcttgctatcaatcccggttctacttcaacgaaaattgcagtatacgaagacacaactccgcttttggtgcgtaacattcgccattcggtaggagaactttcccatttccctcgcgtcatcgaccagtttgaattccgcaagaatctggtaatagaagccttaaaagagaatggtattccttttgaatttgatgccatcgtagggcgtggaggattactgaaacccattccgggtggagtgtacgaggtgaacgacgccatgctggatgatataacccatgccatgagaagccatgcgtgtaatctggggtgccttattgcttccgaattggcagcattgcttcccgattgccgtgcttttattgctgatcccggtgtcgtggacgagctggatgagatagcccgtatcacgggttctccactgatgccacgtattaccatttggcatgctttgaaccagcgtgccattgcccgccgttatgctgccgagttaacagccgcttctcccgatcatccggtgcgctatgaagacttgaatttgattatctgtcatttgggtggtggcatttctgttggggctcaccattacggacgtgccattgatgtgaataatgcgcttgacggtgaaggtcctttctctcccgaacgtgcgggaacattgcctgccgggcagttgattgatctttgttattcccatcgttttagaaaggatgaactgaagaaacgcatttccggccatgccggtctggcagcacaccttggcactacggatatacctgccatcataaagtctattgaagacggagatgaaaaagccgaattggtgctgaatgccatgatctatcaggttgccaaaagtattggagctgccgccgttgcgcttttcggtaaaatagatgcaatcttgctgacaggcggtattgcccattcagagtatgctatttcccgtctgaaagagcgtgtctcttttcttgctccagtgtatgtgtaccctggagaagatgagttggaagcgcttgctgttaacgttttgggagcattgcgcggggagttgccgatacaagtctataagtgatgattggtgggatataagcccgacggttgtttcattccatgaaaattatgtttatgccaaatggtaacttcatttacatactgaggtaaaggtcgttacatgccgaggtaaagagcgttacaatatggggtaaaggtcgttacatcctgcggtaaatgcttttacatcctaagggtaaatagtaggtaaatgtaatgcgttgataaaaaaaggagtaaagtcccccaaatgactttactcctcccaatcttcttttcctcgtaactaatacggagaaaacaccactaatcaaaattctataccttggtcttattggaattttcttttctaaactatatagaaccctcctcttcttttttagccgaagaggaagattgcagacgattgattcttttagaatttattctgtcctacggaccaccataaatctgttccgccattgtcttgcccacctaaagcatcaaccaattgtttgtataattccggttggtcagttttcagatttgcagggaatggaaggcgacgcaccattttatctgtatctatggttccgccactctggtttgttaatgtcttgaacaatttaggataacctgtgcgacgttgttcagcccatgcttcagctccttcagggaagatggccaaccatttctgagtgatgatacgttccagtttttcttcgttagaagcactttcgttccatttaggagtgatggtgctcatagctttcatatcgttcttttcaaaaaatacatctttataatctgttggtttggcatcgcttgccagataagtgtcgacaccactggcgccccattgctcaaaggagagacgtacacctttctcgtagcaatcttttacattctcggtagagtatctgcgtaaggcggcttctgcacgtagaagccatacttctgcaggtgtcatcagtggagctggaaagtctgccgtaatggtgcagcgtgagtggaatttatagtggtttacttctttaggagtattgaagttatatccctgtggaattcccttttgcatacctgtgtagttaaagcgttctgccggactgttttctgcaagtccaccaacagaaggtgtaaaatacttgtcggtacgtggatcatcataacctaccatgaaggattctaaagacgcattcatataaacttcccaccagctaaggccgatagtacccaatggattcttatatccggtcttagtagaaacttctactatatcattgtttgtttccaatactccatatttattggagagggctttcttggcttgttcggatgccatttgagaatttacgttggatactcggatagccagacgtaaacgtagggaattagcccatttggcatattgcgagtaggttgattggctacgcatcaagatgtcataagaaatcttatcctctattccactggagagagtttggtctattaaactgattgcatcatctaaatctgcaaacattgctttataagcattttcctgacttacaggccccgttgcgcgattctcatatagaataggaccatactgatctgtcagacgatgcatggttgctactctatatatctttatcagagccatatattggggaacttcaatatcaaaatcttccgctttattgagtgcggaaactgtttggctatacgaagtggaccaattgctactattccagccgtcattcatattatatacagagttttctccggcaaatttagatgccatatcgtgaaaatatccggcaaacatatcaacacctaagttctgcatagtctggaaagtccagtctgtgccttctccccagttgtagttgaaatagatgccttgttgtatagaattgaaatacatggtatatccggcattatccatgacctgtttgtccggatcataagagccgtcttcggagtttaaattatcgaaattacttgtacaagcggttattaataatccgcccataattagtgtatgtataaatttgcttttcatattacttgctttttagatgatacgttagaatgtaaatttcacattaaaaccaatgctgcgggtagtcggcataccgaaaacatctacaccttgcatatcgtttcctactgacatcagtgcgtccggatcgaatggagcatccttatagaagaagaataagttgcgtgccaccaatgacaggttgatatctttgaatacttttgttttctccatccatttttccgggaggctgtagcttacggacaactcgcgcaaacgtatattggttcctttgtacatataatattctgtacatccgttgatatcgccaactcttgcatagaagccttgcacattattctttttctcctcattagtgaatttctgcccctcgacttcaacataaccacgatccatagcttcaccggcagctttactaactccgtgggcatccagttgtccttgtgtgaatgatattacgtctccgcctatgcgtgcgtctatcaggaaattaaccgatacgccataaaagctgaatgtgttgctccagcccaatgtgcatttgggttggctgtttcctaagtattgctggcgatctgtattgagctcggggagcccctctgcgtctaatacaatctttccgccttcgtcacgtttgaatgagttgccataaaggtcacccaacgaaccaccttctttgacaatcatgcgataggccatgttaacgcctgagccataagcaaatactttatagttgtctgcaagcttttctaccttattcttattagtagagaaattaacctgtgttctccaacggaagttttcattttgtacgggtatgccacctacggttaattcaatacctttattgctgattttaccagcattaatcatttggtttttataggcagaacccggaagcattggcactaataaaaattggtttttagttaatgtcttataccaagtgaaatcaatgtcaaagcgattgtggaaaaacttcatttcgaagccggcttcgtaggaagtcgatatttccggttttagattgccgtcattataatcggttacctggttaatgcttccgcctatggcgatacgcggctgttgatttgctttatatagtggcaaagtgttgccgacttgggctatagaaccacgtattttggcaaaattaatccattcgggcaattcaaaagagttgtgagctaaccatgatacaccaactgacgggtagaagaatcctgaatccattttagatgtaccgtaaagggtagaagaccagtcgttacgggcagttaaatccagatagagtgcttcattccaacctaattgggcagttgcaaatactgactgcattacttggcgagcttcattcgtgactgtcatatcagttgaagaaccatatttaatgttagtcagagtgaatacattagggtaatataagcctgctgtatgagaatcgatccgtaaactgttggatttctgatagttgatagacccgcccaatgccgcatttagactgaatttcccccaagttttattgaacatggccatcaggtcaccgtaagccataaaatcatctccgtttgcataagcataacgtccattgtctgtttggtcagcccagctgccgcctgtcagcgttgttgaggtagaagcccatgttttctcttcagatttgtcactaatgtaatctgctgtaccacgggtctgcagtttcagccaatcggtgacttcccaagtagcacttaaagaagcgatggcacgggtacgagtgtccttcgtattgatgcgattgactaaccaataagggttaccttccattccttgtaaagtttcgggatctttataccagttttgtttgggcatattacgagcctcgtcaagaatctctccgcttttatagtctgccatatccaggtcacgtgggaatgtataaagtcctaccaatggattcatgtataatccacccgtaacagggcgattgcgacctacctgacgcattacatttacatttccatccaatgtcagtttgtcattgaagaacttgccggtttcgcggaaggtgaggttatgacgttccagtttgtttttttcaataatacctttagctgttgtattggcataagaaaaataggtttgcgcttttgcattaccagttgataaggaaatagagttaatggctgtaacaccggttccaaaaaaatcgtctacgttgtcatgatcttttaggtctgcctttttccatttagaattgtacgaattctggaattcaggtgtggaaatagcttggtcaaatgtaacatttgcggaataagtaatgcgggttgaacctgcatttccttttttggtagtaatcatgataacaccatttgcagcttgtgagccatagagggcagctgcagaagcgcctttcagcacagaaatggtctggatgtcgtcagggttcagattggatataccgtcaccggaatctcggttgcctgagtctgaattaccacccatgactgaagaagttgtttctttggcggagttcatcattggtacaccgtcgatgacgtataaaggttgattattgcccccttcgaaagctgagcggataccacggatagaaacttttgccgagcctcccaggcctgaagcactcttattgatcgttacgcctgcaatcttgccttccaatgcattaatcatattggcgtctttcactcgggttaggtcgtcaccaccgacttgttgaacggaataagtcagcgaggaggattttcttttgatacccatagccgttaccacaaccgtttccagtgacagggcttcttcctgcatctgcacattgagagttttctgcccgttgagagcaatcgttacaggctggtatccgataaagctgataaccagcgttgcattagtcggtgtatttagtgtaaactcaccgtctatattggtaatgcaaccgtttgtagttcctttttccacgacattggcaccgataatgggttcaccttttgtatcggtaacaacaccttttacagagatattttcttgttgtacggcagcaatgatttcactggccttttcattttgtttggtcagcacaatattcttgccttccattacatatctgatgtcggtaccattaaagatttcatccaaaacttcggacaccggttgattgtctgcatctacatttacggtgcggcgcacgtccacacttttcttattgtagacaaacaaatactcggtctgagcctcgatattatcgaggatttcgcctactcgtaactcagaacgggggatgctaattcttgtactctgagagtaggtagcatggctgtacgcctggaacgttacaaacaaaagaaggaatagtgtgatcttcatagttcgtaatatttgcttaaatactaaactttttgggcaaaaaagcccattcaaagaaatttttctcatatctttgtaatgtgttaagttaataaattgattaaggtcgatttttgactgtttcggatcggaaagtatgggggtactttccgatcttttttgtaggggtaattagcagactgtttcttctatttcataatgcttttcagtttaaggggttagtactaaattttaaggttttatttttgatatcaaattatttctcgtaaatgaaaattgaatctttttcttcgttgatgctgaattcaaagggatggtcttttgaaatggttcggagaatatgctctataccatcctgttcgcggaattttccggtacaactgtcatagttcagcaatttaggatcggaaacggttatttttacattatagtacatttcaagtttagtgaggatgcagctgaacggcacatcatcaaagcaatacaatccttccttccatcgcagatattcataagaagggagtattacctttttgcatttcccgtcatagttgccaaagaattcctctttctgtaagcgggtgataaccttattacagttggcaggataaatatccacaataccttctacaagggtggtttcaaactctttgcttcctgcataggcacaaacattaaagctggtacctacaactttcaccttattcatctctgtgtgcacgtagaaggggatatctttgttttttgccacttcaaagtaggcttcaccatccagttctacgtttctttcgccacgcccaaagttggaagcataggtcaatgtggactgtgcattcagccatacccgtgtgccgtcggcaagagtgatttgtgcacgttgtccggcggggacggttactgtttgtggcagggatgcctggttatatagataatcattagtcatgaaataaccgcatacgcctacgatgataacggctgctacgcgtattccccattttagtatcggagccagacggaagatcttttttccggcattttgtctgtcggagaataaggcgacatcaaacatcatacgttctttcaagaaagcttcccgattttcttccgaggcttccacccagtcaaggatgcgcttttcttcttcaatggtggtggttcctttaaaatacttatataatagttcttggttcataaggtacttgatttgtttgttgaataagggcgtttttttctgcccctctataattaatacagatgaacttggaactaccctaacggaaaatgaaactttttttgttttttcttcgaaatgagttggaaacagagaaattgtcgggaagtgatgctctggaagcaggcggaatgagatgtgtaattttggtcaggaactcttctgaaccgtatccggttcgttcctgcttcgcttctataggaggatgaaaatagcgaagcaggtacgaggagggtacgaagaagataagaaccgggtatggagcggatagctttgttctgtttttcgggtactccaaacgtaagcgcatagaatatccgtgtgatgcaccggaggcacatcagaactttatggaatgtgacaggaaattgattaattgccggtattaacttgccggattgggaattatggatacaatgtaacattcatccggagcttcagctttaaatagattgtaagcaatgcctatggcttcctccggagagtttgcttcaatattcttgttgacattcagggtctcgaaaacttgttctccctcgataagcacgtagtatattattacaatatatctcataactaccatgtttaatagccagcaatattactgattttgcaaacatatatcttttatttatattatcaaagaaaagtaggggagttctgctaaagtaggatagaggcaagataatctttcagttccacacgcagaatacgtagggctttggtgatatggaattctactgttttgagagagatattcagttgttcggctattttcttgtttggcaggttgctgtaacggctgagcataaagatttcgcgactttgtggtggcatcttgtccaaggctttgtttacgatatgctgtatctccgtactgaaaatcttgtcgggctcacaatctttcaacgtggcaatacgcaagtctaactcgcgctgacggtgcgaatttaaatcttcctcaatacgcaggcgggtttgttcgtgttccaggtaattgagtgccttattcttgataatggtaaggagcaatgcgtgcagacctttatcttcttcccagcggtcgcgacattcccacaaagaaatcatagattccataagaatatcttcagcttctgcccagcttctgatgtaggaataggcaaaggcaagaaacttttcctgattctctcgaaagaaacgagaaaataaatccatagtatgtaggtttccggctaaaggcatttttaaatattctctctcttatttaaggtttatagggtaaagtaacataatctttttggaatacgcaaaagtctgaaaagttttttctgtttttttccttcctttttttacaaaaagaaagcccggcgggtttccgtcgggctttatatactgaagaataaggtgtttcttatttcttttcaggtctttcttgtctttccggtctcggaagcaatactttgcgggaaagtttaaacttaccggtcttcggatcaatatcaagcagtttcacttcgatttcatcaccttccttgataccggcctcttctactgtttccagacgtttccagtcgatttcagagatgtgcaacaaaccgtctttacccggcaggaactcaacaaaagcaccataaggcattacagaacgtactttacctttgtatacttcaccaacttccggtacggcaacgatgcccttgataagacgcatagcgtcatcaatgctcttcttgttagttccggagatttctattcttccgatgttgtctacttcttcgatagtgattgtagcaccggtttcttcctgcataccttggatgatcttaccaccagggccgattactgcaccgataaactctttaggtatagtcatcgtttcgatgcgcggagcatgaggtttcagttcttcgcgtggttcttggatagtttccagaatcttgccaaggatgtgcatacgtccttctttagcttggttcaaagcgcgttccaggatttcgaatgacagaccgtctaccttgatatccatctgagtagcggtgataccattcttggttcctgttactttgaagtccatgtcgcccaggtggtcttcatcaccaagaatgtcggacaatacagcatatttgtcttcgcccggattcttgatcaatcccatagcgatacctgataccggttgtttgatcttcacacctgcatccatcaatgccagtgttccggcacatacggtagccatagaagaagaaccgttagattcaagaatatcggatactacgcgcactacatacgggtagtcagcaggaatttgccctttcagtgcacgccaagctaagtgtccgtgaccgacttcacgacggcctacgccacgttgtgccttggcttctccggtagagaacggagggaagttatagtgcaacaggaaacgttctttgccatgttccagtacgttgtcgataatcttctcatccagttttgtaccgagggtaacggtagacaaggattgagtttcaccgcgagtgaagatagcagagccatgagggccaggcaggcagttgatttcactccagataggacggatctcatcagtcttacgtccgtcaaggcgtttaccttcgtccaggatgctgcggcgcatagcctctttttctacatcgtggtagtaacggtcgatcagtgctgctttttctgccagctcttcttcgctgaactgtgctttgaactcttcacggatagcatcgaaagcgtccatgcgttcatgtttatttttgttgccggaagcggcgatggcataagcctttgcgtagcaagcttcgtgaacggctttacgcagttcttcatcgtttacttcgtggcaatattcgcgttttacggtagaaccaacagcctctgccagttctttctgagccaagcattgcactttgattgcttcgtgggctgctttcatggcgttcagcaagtcaagttcggaaacttcactcatttcaccttctaccatcatgatgttttcgtaagtagcacccaccatgaggtccatgtcagctttttccagttgatcgaaagtagggttgataacgaactgtccgtcgatgcgtgctacgcgtacttcggaaataggtccgttgaaaggaatatctgaaactgcgagggcggcagaagcggcaagccctgccagtgcgtccggtatatcaataccgtcggcggaatagaggatgatgtttacatatacctctgcgtgataattatcggggaataaggggcggagagcacggtcaacaaggcggcaggtcaggatttcataatctgaagcgcgtccttcacgcttggtgaaaccgccgggaaaacgtccagatgcggagaatttttctttgtactctacctgtaacggcatgaaatctgttccgggaactgcgtccttagcggcacaaacagtagcaagaagcatggtgttacccatacgaagcattacagaaccgtctgcctgttttgccagctttcccgtttcgagtgtgatggttctgccatcagggagctcgatcgtcttaacaattgggttaatcataaaaaatgttttatctatattttctttcaaaattcgtgcaaagatacatattaattcatgtaatcaggtgggaatgagataaaaaagtttataattgactatttttttaggtttccatgtggaagaagcaatgaaaatgctttgactaaacttgaaaagaactatatttgcacgttctttctaatagaaattaagaagctaaatatgaaaaagatctgttttgttgcacttgccgctttggctttaagtgcatgtaattctgaaccgaaattcaaagttgaaggtgaagtttcaggtgccgacggcaaaatgctgtacctggaagcggctgctttggagggcatcgtgcccttggattctgtaaagttgaagggtgacggttctttcagtttcaaacaaacacgtccggtatctccggagttctaccgccttcgtgtggacgacaaggttatcaatttctctgtggattctacggaaactatcggactgaaagcgccttatactgattttgctacggcttatacggtagaaggttcggcaaacagcaccaagataaaggaattgacgctgaagcaagtgcagttgcagaatgaggtgaatgagttggtgaagaagatgcaggctcatcagataggtgccgatgtttttgaagaaaaactggctaccttgatgaaagattataaggatgaggtgaaaactaaatatatttttgcagctcccaatacggctgccgcttattttgctctgttccagaaactgaataattaccttatcttcgatcctttgaatagcaaggatgatattaagtgctttgcagccgttgccaccagtctgaataattattatccgcatgcggatcgctccaagaatctctataatattgtgattaagggaatgaagaatacccgtacaccgcaacagaaagttctggagttgccggaagaagttatttccgaaaccggtatcatcgatatcagccttcgtgatatgaaggggaatacccataagttgagcgatctgaaaggtaaagtagtcttgttggactttactatttaccaaagtgcagcttctgctccccataacttcttgctgaatgacctttatactaaatataaagatcagggactggtgatctatcaggtttcactggatgctgacgagcatttctggaaaacaacggctgataatctgccttggatttctgtaagagatgcaaatggaatttactcaaatgtggccgctatgtacaacgtaaaggaggttccttctctgttcctgattaatcggaatagtgagttgagcgctcgtggagagactataaaagacttggacgctgcggtgaaagcactgttgtaacttgttataaattagaagtttttatttaaatatgttacatagcagcaatttttgcttgacacgcattaattaaaaggctatctttgcaaaagaaaaatcggaagagggttccagcatgctgaccatgttggaattcttttttgttatataataccatttagaaactaaaaaggaggaaaaaagtatggcttatatgtcagaagaaggctacaagaaattgatggccgaactgaaagaattggagacggtagaacgtcctaagatttcggctgctatcgccgaagcacgtgacaaaggtgacctgtcggagaatgcagagtatgatgccgccaaagaggcacagggcatgcttgagatgaaaatcaataaattgaagacgattatagcagatgccaagattattgatgagtccaagctgaaaacggattccgtgcagattttgaacaaggtggaactgaagaacataaagaatggcatgaagatgatttataccattgtttcggaaagcgaagctaatctgaaagaaggaaagatttctgttaacactcccattgcacaaggtttgcttggtaagaaagtgggtgatgtagctgaaatcaaagtgccgcagggcatggttaatcttgaagtagtgaacatatcattttaaagtaaaggcaggtccgcatgcgggcttgccttaatttatatatcataaaagttatggcaacaatattcagtagaattatcgcaggtgaaataccaagctataaggtggcggaggatgataagttctttgcatttctggacatcaatccgctggtgaaagggcacacgctggtcgttcccaagcaggaagtggattatatctttgatctggatgatgaagatctggcagcaatgcatgttttcgccaagaaggtggctcgtgccattgagaaggctttcccttgcaagaaagtaggtgaagcagtgattggtctggaagtacctcatgcgcacattcatcttattcctatgcagaaagagtcggacatgctgttctctaatccaaagctgaaactttctgatgaagaatttaaagcagttgccgaagcgattcgcgctgcattctaaaaataaaactccttccttttataataagaacgggggctgaaatggattcagtccccgtttcctttattctggtttgaaagtctatgctttcaaattccgatatccggttagatgtaatcttcccctaattttatttgtgcgtcgtttacgtatttgcggatagaatgttcttcatccttcttgcaaatcagcagtacattgtccgattcagcgatgagatagccttccagtccatcaataacggcgagtttgttttgtgggagcaccacgatgttgtctttactgttgtacattagagactcacacttcaaggttacatttccttctttgtcctttggggacaagtcatacaatgacccccatgtacctaaatcggaccaaccgaaatctcctaatgaaacatatacattgtctgctttctccatgatgccgaagtcgacggatacattggggcatgcagggaaattttcgtcgatgaatgctttttcggcaggagtaccgtatacatctttaccaggaatcagtttgcttgccagctcgggaagtagtgcttccacggccttgatgacagagtttacattccacatgaagaggccggagttccaataaaattctccgctttctacgaaaactttggctaactccagttcaggtttttcggtaaaggtcttcaccttgtagaaattatctcctgcttgttcggctatctgaatgtaaccataacctgtttcgggacggttcggtttgataccgagagtcagcaacttttctgattgagatacgaacgtcaagcctttttcgatggcatcaaggaactctccttccttcagaatcaaatgatcggatggagctactacgatattggcattcgggtttaatgcgcgaatgtgataagctgcccatgcgatacacggagcagtatttctgcgtgtaggctccagcaagatttgttcgggattcaattcaggcagttgctcctttacaagatctgcgtataaatcgtttgtaacgataagtatgttctctgtgggaataactttattgaagcggtcgaaggtttgttgcagtaatgacctgcctgtgccaaagaagtccagaaactgtttagggagcgtttttcgactaaacggccagaagcggctgccgatacctccacccatgataacacagaaattatccttatttgttgtcatatcgtttgttttaaaagtttctgctaaagtacactatattttggaaacacggaatgtttgtagaatgttttatgacttttttctcctttttttaggaaaagtattgcaggtttagaaaaaagccgtatctttgcaccgcaattgagaaatcaagcatgcccagatggcggaatcggtagacgcgctggtctcaaacaccagtggattcacttccatcccggttcgaccccgggtctgggtacgaagtaaagcagctaagttgttgtatatcaatacttagctgctttctttttaccttatctgttcccaatttgttcccacagaacttcattctctccctcgctaaatgtggttgaatgcctttaaatattgattgctttgcaatttgtaatgctaatgaaaatcaatatgttgagtagttgaagaaccatcaaggtacaaacagcaataaaatgtaactattcaacgaatgcaaatgaagtgccttgtcctgatatagcttaactatttggtcaagctatatcaggacaaggcatattcaataagtcaacggacagtatgtggataatcacatgtacctaaactcaaacttttcaatcttcgtgaattaggcatcatcagagggaccataaggagtaaaggtctgatactatagcaggacagcccatttccgctcttttggtggtatatgtttattgcttttctatgttgatattaggtgaagcataagccttatctaatactaaaaggagaagcggaatcattgtagatgttgtgggattagcttcttccacgttgtactttaggcgcaaagtatctgcttgcgatataagtgaaacaggaatgtacttcgtggggcgattggtttcgcaacctattacggcgatgacaggcgatgacgctttgacgggtgaaatctatttgagtgggtgtaccaccttctcccataaaggctgcacaaccgaaaacactgtcgaacgcctccttgctgtcgtagtagcaggatagatgaggcggtgcgtcgttacgcacaaagtagccgtgcgcttcggtgtaatccacttgttttgctttgtctgtcatgccgcacgataccatgaatatcgcagcggcaacgatggataataactttttcatatacgattatttattaatgtttattcttatacctatatttaagtccagattgaatggcttgtctttatacacgttatccacggagctgtggttgtcaatataataacttgcacccggctcgatgaacaggcatgtgtttttggcaatattggcttcaatacctgcggagagtgtggcagagagttgaagcggtttttcacttaccttttgctcttcaatggaatttttgctgccaccgatgacaaatttcgtcttggccttgcccgatacgcatttctctaccataccaccgccgctaacataaatgccgatacgcttgctgttccacaacttgtagcggagtttcagcggaatgccaacatagtggagcgtttgttccgtgtgatagtaattttctttggaacccgattccattgatgatgacagcagtgtgtacgttatgccactctctacggcaagggcttcggttaagggtaccgatacacgaatgccggtacgcacgggcagcttataatgcttttttgtttcggcatccatcccttggttaagttcgaagatgtcatcatagggggtgtttccatccgatggttccccgggaccggatccaatcaaggtgaaattatcttgtgtcgaagtgttgtttgccatgatgttgcctgcatagagcgatacggaagctgactttcggctcttcgacttcgtaaccatacggtcggcaatccacaggtcgttataaccgcctcgttttcgtttgttatcggttttcttttcgtctttgccattctttctttcttctttgccgtttgatggaaggacttgttcgccctgtatcggttcttcgtcatgcgttatcgtgtcatcgttcgcgaccacttgcaagggagattttccagtgtctgccagacggatggcttgcgtggtggtaatcacgcccggtgtagtgacttgcggcttcggcgtatcaatacttttgccaatgctcctcttggctatttgcggtaattggtcatttggaatgggagtattgaaaaacaacgaacctatacccatgagcaacgcaatgcaagcagccgctccgcaatagcgcaaccacaatggaacgatgcgatgctgacttttcgtcggcagattgtccacgatgccgttccaaagctcctccggcggttcgggaaggaagtgctcctcttctttcctcaggtattctatcaaatcgaaatcactcatctgtcgctcctttccttatattggtttattttcactgcaagcatcttcttcgccttgtggaattgcgaagccgatgtgtcttcttttattccgagaatgtgggctatctccttgtggcttttccgctcgaatacgtaaagattgaacacggagcgatagcctgcgggcaactcgcctatgagtttcctcacctcttcgtatggaatgccgtctgtttccgccgtttcttctaccacgtcagcgtattcgtccaccgattcgataaactgcattttctcgctcttgcgaagaaactgtagcgaattgtttacgacgattcttgtcatccacgaccttaacgaagcgttttccttcggccggtacttgtcgatattcccgaatatggcaacgaaagaatcctgaagcgtgtcgcggacatcttcaggattgactacataacgagaacacacagcggtcaagtagcgggcgtgcaagaggtaaatcctcttcatggcctcttgctcgcctcgccttgctccgtctatcagttcctgctcgctgtagttctcgttatgcatcacgttcatcccgaatgacagttcgttacttaaccgttacgttgatggttgccgactttttgttcttgtcggtcacggtgactgttgtcttgccggccttgacacccttgatggtaatcttgctgtccttgacactggcagtcgcgactttcgagtcttttactgttgcggtgtaaggcgcagtgcccttcgatacggtaacgtcaaccgtctttccgacagccatctccgctgacttcttgtcaacagtcaatgaagacgatgcagccttcacggtcacaataacctgtcctgtctgtttgcttttgtcagttaccttcacgactgcactaccctcggcaacacctgtgattgtgattgtcttgcccttggttttgaccgttgcaaccttcgtattcgacgatcttaccgtaaacggggtcataccacttccgatagtcaccgtagcggtagctttcggagctatttccacttttgcaggattgagttttaatgtgttaacgggctcgtcgtcatcgttgtcgcacgaagcgaatgtcatagcagagatactgattacagccatcatcattactttcaagatattgaactttttcatttttaccttttgctttttatttgtttattactgttgttcttttttgagcgctcatctatataataccgatgtcttgaaaaccttgcctgcggaagcaaacttttttttatccataaaaaaacaagaccggcaacctaaagtgtggtgctagtcttggcaatgacataattctcttattgactgacgataaagcgtattgttgggctatacgtcaaggttattgcacttcataaagttcgatgggaagtttatccggatcttgaagaaaggtgaatttgcgccctgtatattcgtctattcttacaggttcacattctacgcccttggctgtaacttcagctatcgctttgtctatatctgctacggcaaaggcaagatggcggagcccgcaagcttcagggtgactaacccgttgtggtggtgaaggaaaagaaaagagttccacaacataagtaccatccggcagagcaaggtcagtcttgtacgactggcgtgaatccctataatgttcacttattattttaaggttcaaaatttcagtatagaatcgaagagattgcatataatctgaagctatgattgcaatatgatgaactgctttgatttgcataaggtatagaatttttaattgtatttattacactctgtttgtaatgaggcttacctacacatatattataatttaataatactatattctaattcacttagctatagcataattggggttacaaagatagatgaattatcattgatattccgttatcaacactgatttctctacattaagagaggtattttcgcctccgattatctgactaattgctgtgttttgtttattttccaatcatacgccccgtctgcaacatcgcccacctctttgagtgtgtggcgatgtttgatttcgtcaaagggctgcttatgttccgcatagccacacagccagtcaccaaccgccttttgcatttcggttgtttcgccatattcctgcatcacacttttaatgtcagcggcttccgatggggcaaagattgacttgtgctgttccgttccaaaatggataatcgcattgatggctcgtctgaacacctcgcttgcttggtagagaatatcggcaatgacattcagaatttttcggctggcttccaatgccccctgcaacaaacggatagtgttgtctttcttcttggtggctgtaagaaccgcttggctgatgcgctgctgtatgtctgcttcctgcgcttgaagttgcctgacggcatcgtccctctcaatgactgatgagcgactttgcgccaaagccctgtttcgctcggcttcggcactctgctttgcttcgaccaaagcctttgtctgttcttccactttgttttttacggcattgggaaaggctttcttgatacgctcgatgtcggctttcagttgggcgttttcctttttaaccgctgcggatttgccgaccccgacaatactgccgacactgtcaagtatgctgtccatcttagccttgcgctcgtctttgagctgcctttccttatcggcaatctcgctatcaagtgaaaggctgtattgttctttcgccttgttctcgccctcaatggactgccgatcggcttcagctttctccttggcggcaagggctgcttccttttcggctttgaccttttcggcttcctgtttctgtttggcgatgatgaagtcgtttcgctccaaatgttccttgcctgtcagcttctttgaggtgcccctctgcatctccaaacactcagccaaaacggtctgcatttcgcacatggctttctcgtccagcttacaggacttgcctgtttcatggttcatccagtcccagacgatatgtgcgtgaagattgggcttccaagtggcaatgtcttcgggattgctgtaatgcccctcgtcacggtggatgaacacttgcaggggtgtgataccccagcgttccttgcacacctcacaaaaatgccgtaactgttccatagtggtatcttccttgattaccaccacgccctctttgagcggagtgctgccacggacaatggtcaccttgcctgtctttttgttcacccgttcacggtctttggtctgcatcgcccgaccagtcttttccttgaccattgcggctatctgattgtagcgttccgtgagcgatgtattgccaaagtcaggtgctacccatgcttcattctgcggcatgaggtcagtgcgtatatagaacttttctttgttgatacgggcaaggtattctgctgtccgcctgttatggggttcgctactgccgatgttgcagggcttgatgttaatggatgtcttctgtgccataagtttactttattcgggtttcacaatgggttattagggcagagccttaatcggagggtgcagggagagggtcacttcttgctccgggttctcaggggtggaagccactgagcggagtttccaaagagagggtcactctttggtcgggttgcatagggctgacagtccttgccgggttcttagggcagcgtcctgagtgggacggggcaacgcccagcccctcgggagagcccacaactacggaagcgaagcgtgtagttatagtgggctatatcagggcaagccctgtctgtcacaccacggcaactctgctaccagcacattccgtatttctttttacgaatatcatctaagttgggttttacgattattaattccatcgttgattttgttgattctgttgaaaacgattcaaaaaaagagggaaaagaaaattaaagatgcagtacgcaatcttttttcttttttggcaggcaaaattctttgttgaagtttgttgagggtattgttgaatagtaaccctcttatttatacttcttcccttatgtttcatcatattcaacaatctcaacggtagtctttcaatttttcacgggtaacggtgtaaaaacgtcccacctttttggacgatgcagaatatttctgtcccggtagcacggatatttgataggtggagtaagacagcgcattgggtgctggctccagtttccagtactgctgcagaacattcctcacctgatgacgctccatctttaccatagaataattgaacaacgctaacaggtcgttgatacagaaatctaccacatccacctgcattgtgtccatgatgtcaagcaacagttctgccatatcaagttcaatgcgactgcggttgcagcggataattttctccaacgcttccgtgcggatgagtgagggtgcaaaccacatacggctttcttctttagtggtcagattccgatgttgtagatagtacagaaatgcaggtatctcttctttcagtttctgaagaaaagaggtgtcatctttttccaatctgctaatctttctcacccaatagcgtgtttcctctggctcaatgtaaacagggaaattctcattattagaacacaatacgaatttggcgaagaactgcacttcatagcggtctttgccctttgcctccatcttgtatgagtgtgccgtactgaggttcttcaatcgctcgctatcttccctacggttgagtaacacctcgtccaccactatcatcagtttgcctgcccagtcggcattaaactggctccgaaagtcctcattggtgttgaaggtcacgttctcttgaaataacgctttcagaaaattcaggaacgtactcttacccgtgttccgttcctccgacactaatagaagtatcggtaacttctgtgttggttttagatacaacagttgaagataatccattcccaattcatattgttcaccaaagatgtgttcaatcaaggattgtatatgattaaactcgccttcttttggaatgtgggttattggctcatagagattataaaagttattcacgttcaaacggtaatctatatgacttggcatagtgcagaatccgtcatatttcggaatgagtgccgcttcatccttaccgtggtctaatcggaatatactcattttccattcaacccgcattttgcggaatgccccattcatcattggctgattgattatacgaaacaaggttgtaccgatgcggacatactcctcttcaatattctcaacttctccacttgcagaagtaacaagcgcattttcaatcttttccataatcagatattttattggtttctcccaagatgcacttcacgtctgagaagcggtatcttactttgtttcccaccttgattgctttcaggtagttgcgcttgttccaaagccataaggtggtgtcgcaaacgccgcacatttccttgacttcctcacgtgtcagcagtttgtcttcattggtggctttgagcgcaacagccacctcattcactgcgcgactaataagttcatcggagaagtgccgtaagtcttcactcgtaatctccaatttgatattagctgtactattggagatgatttgcattaaatctgtcatagcatatatgtgctgccatagtccgacacaatcactttggcagcattataaatgattgcgccaccgctccgacattggaacgatggcgcaaaagtataaatgtaattcgctataattcaacaatctacatttcgcgattttcgctgaaatcataaacgaaagaaacgaaatgtaaggcaatcaatttggttcgtctgaaaatggtcttatctcaatgtcaatactgaattttgaataagttggtctataactggatggtaaatggctccatcagtaaccgctgtaattgtcgtaactttattgcctccatctttcgatgaagcaccacaatggtaaatctgttcatcagccgtttggtaatcaatgacaatatacctgtcgtggaatattcccccagacgtttgcagcgaaatggtaacattgggatattcacggcagaaatcgttaaactcggcttggtgcaacctattaccgatattgtcggagaatactacaatattcacattagccggaacatctttaagaagtaccagcgtcttcagtccgatgtaattatcaactataaatatcgttttcttggcggttgcataaatctgttggtaagccaaatccgattcaacaggctgcccattgagtatcaaccaacctctccttactgaaggactgccaaaatcaagcataacatttgccagttccgacttcgtaacaacattacccaaagtgcctattatatcggctactttgtcatcaacagctgatagggatttacgcaaatcaagcaggtcttgtgtgttttgggttgtctgcaaggacagttgcagatactccctttgccccaataatggctgattatctacgatatagtctttcatctgcttgaagatgcgaatcaaagccttactttgcttggttgccaaatctccttttagaacagtcataagcatatatataccttgttccgtgaaggcataagggttgtatctacgacctccccaacttgaggtggaatttttgcacctcaagatttcacactcctcatcggacaattgaaacatgaagtcttgctcaaacttttcaatgttgttctttacttgacggttaaaatctttggtgctatagccatagattttggctaagtccatatccagcattacacgaacacctctaatgctgtatatataacctttcagatattcggcactgatttcttgggcgatgatgtctttatccatatcattaaattaaataggttcattcttttagttatttgcttctgtgaggtaagtcttccactcattgataagcgaccgttcaataccattgtcttttattttccccctatttgtactgtcattcaacttcttaatagaaatttggaggtttcgcacagtcttcaagtcgcaacttggtagttcattggcaagtagcttatggaatgttgtcacatcacagcctgttagaagttcttcctcttgaagggcaaaatacaatcgtgccaaatcggtgcctgtgtgctgcgttgaaactcgcaattttatcttctccaaaatctgttcttgatttccgtgaagataatcttttaatgtgcgtgatggctgctgctcaccagttggcgatttttcttcaataggtttatcatcaaaagacaatctatcaatggttgtttctactacacaatcatcctcaatagcctttttctcctgacggaaattctgccaatcctcttttgttcgcattttgttacgaatactgctactgataaccactttaatcattaaagcagctatctttttctcaaaaaagttgttcgccgggttatgtgtttcagcttccagttgagtaaccatagtttcatagcacttgccgtaatacagccatgccaacattgcaggagctattgaatcgttttgcaaattgtgaaactcctcgaccaataatcttgcagcatcggcatctgccgaatagctttgcagacggtgttcgtcagcaaggtctccatggcactcgtcttgatatttacgcatcatttgaggagtgagtttccatcctaatttgaaaatcttttgcaaaccgattgccgatttgttgttcacttcagcaacgaatctgtcatattcttccggatggctgtggagccattctttaacatcctgtttgaattgttcgaaatcttgttttgccatagtctttcctttattagtccaacaagtgaacaagttcttgtttcatttcctcgtcaatctccctatatcggcgaaatgccttgctgccttccttgtgtcccgataccgatgaaacaagatccgggtctttcaccttcttatacatattgccaatgaatgtctttcgggcagtatgcgtggttacgacttcatacaaatatttctgctcaggattgcgagtaagtgggttaagcactgtgacaaccctgtcaagtccggccaatcggaacgcttctttgatggcttgattatatttctgctctgatataaagggaagcagagttgctcctgtataatctttgtagcgttcaagtatagatttcgcaacactattcagtggcactcttattgttcggggattatgaccgcgtgtcttttcttgtatgtattccaacgctccgttcacgatgtttttctttgtgagcttataaaagtcgcctacacgacaacctacaacagattggaacacgaaaatgtcacgctgaatggcaagttgcggacgggcagacaaatcagcttcaaacaatttgtcacgttcttgaagggtaatataaatcggagttccataaagacattcttccaaagggaacttgtcaaacgggcgattggtggtcttgccttgattatagcaccatataaaaaaggtacgtatgcgtgagaaactgtctataagggtgttcttccctctcggttgaggagtccgtttttcgggaatggtctcatatatatcgggatattcttccgcatacatatattcgttctccataaaatcccacatatcggcaagcgtctctttggttgtagtatgaatatcaagggtaaaatgtttcatcccacgccttgtttttctgacaaacaattcatagcgcatgagagccctttttactacacggaagtttttcttccgtacctccgaaagattgtgtttctccaaaaactcatcgaaaagttcggcaaaagtaggtggattctctattgccaactcttcttctgtcttgtacttttcgggatgatggaatttgtctatgacttccccgagccattcacttcctgcatcctctttgtattctttctcaatcattcgggccaatgcctgtactttatggttcaagtccatcttctcgttttccggcaccagagctacacggtctttataaccctgtcgctcaacactccaatggttcgggctgataacaagctcgcttgctgccttgatgtcctttttcccatcacgcaaacgaaaatagatagtagccttagtatctacatcgttctttttggcaactttccgtataaatgcagtcactttcataatcttcgatttaatttctggattgaacactgcaaagttaacgaattgttcccaaattgttcccaactatcccgaaataatttcaatctcattaaatttaatccgactcaatgctatttataaatcgtttatacataagtaaatacagggaattttgttgtgaataggatttgtttccgtttattgatatttaatatttcgaatgcgggtctgggtactgaagcggagaaagttgaaaaactctctccgcttttcttttctacttctcgtaatttattgatttgggatcaggttgaaatgttatgctcttgttattagagttttaactctgttaaactattagctcttcttctttcagtttatctacgtgtatgaggacatttagtccttgtgccgcttcattaatcgttcaaagaacgggcaatcgtttgcttttgtccggtctgtgttgcatcagtatcttaagctttattgtataccaaccttgcttaatcggcttgtcaactaaggttgacaggtcgattgaccttggctaataggcctgttgaccaaggttgacacccagttattcctaagggtgaatgagatttctcctagttctggataagaatactcttgatgtaaaacaaatgaataccatatactggggtaagtaactgctgtaatcttaattataaaattagtcaaccaaaaccaggacgagacatagtgagagtaacatctttactctcactcttaaaagttactctcactcacacttaatgtttttattattaatgatttgtctgtaaagtgagggtagtgagagtagatactatcaactttttattgaagactgagttcaagttataaatgcgacattttttctatttcatcaacatcataccctattttatattacaacttatgtttaatgcggatataaatagcaaaaagatgaacgtaatatgcaaatttgtcattggatatttcttaggcatttattttttcctaactttgcaaaggatagttgagaagcttttgccattttatattttaatatttacccaatatgccaaatcagaatacacttctgtatctccctttgacatttcgaatacttgcggttgctattttcgcttgtttatttctggcgcccaaggcgatggctgatacgaaagatcaagagtatattgttcttatcagttcttccacttttcgtgagaaatgggcttatgatctgcttgaaactgtagaaaaggcattcaatgaagaaaattcggtgaaggtatattcggagactctcacaacatggcatttcaataatcaacaggaaataaatcagaaggttgattatctaaaggataaatattctgttcctccccaagccgtcatatttgtaggcgatccgggatggtacgtttgcaaaccgctttttgatactatctggaaaggggtacctacaattatttgccactcgatgccgcatacgtcggctgatataaataagtattataatggtgaatatatacctgaagaccagattatcgctacaccggaaatgctggaacggtataatgtgactgccataaatattcctgtctgcattaaagaaaccatagaattgatgaaggagattactcctgaaatgaaaaaggttgtcttgttatcggatgacagatttatctgttctctaattcggaaaaaagcagaagatatacatcagcagtacttttctgatttggatatggaatttattacttatcctcagacaaatacagaaacaatgctccgcattattagtgagtgtggtaaagagacaggtattatttactgttcatgggtgaatgtggccagtcagaatctgtctgagaaatattatcctgatgagagaatgcattcttatatttccggtatagttaaaaagccggtattctcgttgtctgatcagttcacaagggggcatgctttatttgccggtggacattatataggcagttccgatgtggaaagtatcgttatcggtgaaattagaagtgcactgaagaaggatggtacatacgaggcgaaaacggttgttgccggtacgcccaacacctatcttaattaccagacattgcttgacaagggagttgcattagatcactttcctaaaaatgcggtttattgtgatgttccgcccagttttatccagaagaatattatttatgttgtaattgtattgggtactgctattgtacttctgctattttactttatgcacaagcgtatcaaaaaagtgagagaaacggagtggcaagagcatctgcatttgcttgaaaatattctcgataaccttcctattgcagccaaggtgaaagatgtcgataatgatatgcgctatacttttataaataaaaaggctgaagaactctttgaatatccggctaaggaggcgattggaagaactgatttcgatataatgcctgaggctgcaacgatgatcaggaaagaagatgaagaattggtaagaacgggaattgcccaatttggtaccaggcgtttctttacgaataagaacgaggaacggtttactttccagaataataatattgtttcattttccgacggacgtaagtggattctctatacagcttgggatattacagaccagaaaattttggaacgcaaactgcgtctggctaaggaagaggctgaagagtccaatcgtataaaatcagctttcctggctaatatgagccatgaaatacgtactccgctcaatgcaatagttggtttttcgagtatactggccgaagatgtatcggaagaagaacggatagaatacctcagtatcattagtaagaataatgatatattgttgcaactgatcaatgacatcctggatttatcaaagatagaagtcggtacactggaatatgtctatgcaaatatagacgtaaataagatgttatctgaaatagagcaggctgccagaatgagacaaccgaatgcgaatgtcgctatatgtgcagtgatgcctatgccggatcttcttttatacactgaccagcgcagaattacccaggtgctgaataatttcatcagtaatgccatgaagtttacgaacgccgggagtatcacattcggatatgaagaaccgaaagatggttatatacgcttctttgtgacagataccggtaccggtatccctcctgaaaaggtggcggatatattcaaccgttttgtaaaactcgattctttcaaacaaggaaccggacttggactggctatttcacagaatatcgtgaaggaactcaaaggcgagatcggagtgctgtctgagttggggaaaggttctactttctggtttacgctgccttatgaaaagatgggtgcacaccgttccattcttctataaagtagtttctaatcattttctaatctcgtataagtttattataatccgttccggaagccttaatttttaaggagttgtacttttgcctcaaaattgataaaacaatgatgaggcagattacatttactctttttcttattttctcatgcagcctgtgggcgcaatcgaatccgttaaagttgacgatgaaggaggcggaggaacttttccgtacccacaatcttttactggttgccgaatattacaatgtagacatggcacaggcacaagtggtgcaggccaaattatttgataaccccgttatcacattggagcagaatatttataaccgtctgaacggtaagtattttgatttgggaaaagaaggagagtccggagtgcagatagaacaagccatcaatctggccggacaacgcaacaaacgaatacgtctggaaaagattaatcaccaatccgctttattgcaatttgaggaagtagcacgcaccttaaacagtgagttgaaggaaacctgtgtcgaaatgtatttcctgaccaagtccgtgcagatttatgataaagagatcacttctttagaggaactgctgctattctacaagaatatggcagagaaagggaatatttcattgttggaattatcccgtatgcaggcattactgttatcactgaaaaaggagaagaatgatgcagtaaatgaattggtatcgaagagggggaatctgaagatgttattaaacttgccggtcactcaggagatagaaatacttctggatgaaacgatgctgagccggttggaattgtctagtctgtcacttgctgatctggattccttgttaccttcccgccccgaccaacggttggccttctctatacttgaggcttccaaagcaaatttgaagttacagcgttcattgtctgctccggagtttgctattcaggggatttacgaccgtgcaggaaacttcatcaacaattattttgcagtaggtcttagcttctccgttcctattttcaatcggaatcagggtaatatcaagtcagccaaactggaaatagaaaagagtctgaaagagaaagaatacacagagaacagggcaaactcggaactgtatgtggcgtattcccgtttggaaagggctatggaactttatcaatcagcagacgatgacttggaaaagaacttcaaccggctgattgaaggggtgaacgagaattttcgtaagcgtaatatcagcatgctggagtttgtcgattattacgagagctataaggaaacgagtttgcaattgtatgagactcggaaagatgtttttctggccatggagaacttgaatacggtagtaggacgaaatatatttaattactaagcaatggatatgagcaggattttacaggtttttataggtgcagtactattcttgagcagttgctcgacaaaagataataatgaaacttcagtatctccggagatgtgtctgacagatagtttgatgcaagttgtcagcatagataccgtacatacacgtatcttaatcgacgagttgacactgaacggtcgtgtgacgtttaatcaggagcaagtggtacaggtttttccaatgttcggtggacgggtgattgctgtgaatgccgaggtgggagactacgtacataaaggggaagtgcttgctgtggtcaagagtggtgaagtggcggaatatgagaaacagctgaaggatgcggaacaacaagtggccgtaacccgccgtaactgggatgttgcgcaagatatgtacgatgccggcatggcttcggcccgcgacacattgcaggcccgtcaggaattggtgagtgccgtgacggaggaaagacgcctgaaggaagtctattccatctataatctgtccgatgaatccagatatgagattaaatcaccgataacgggctttgtggcggagaagcatgtgaataaagatatgcagatacgctccgaccagggtgaagaactattcacggtatccggtctggataatgtctggattatgggcgatgtatatgagagtgatatccgcaaagtaaaagaaggtgctcctgtccgtatcacggcattggcctatcccggcagagagtttgcagggagtattgataaggtctaccacatcctcgatgaagaaagtaaaaccatgagcgtgagaattaaacttcgtaatgaagattatctgttgaaacccggcatgtttaccaatatatatgtacaatgcgaatcaacggatgatacgatgccctgcattgatttacatgccctgatctttgagaatggaaagaattatgtagtgacggcaaacgaagacggcaagctgcaagtaaaggaagtggaagtgtataagcagttaaggaaccgatgctatatacaatccggcttgcaggagggcgaccgtatcttgaatagaaacacattgctggtatataacgcattgaatgctgaataacagataaagaacttgatatgcataagtttatagataacatcatagctttctctttgaagaataagttcttcatattcttttttacggtacttgcggttattgcaggaattgtctctttcaagcataccccgatagatgcctttccggatgtaaccaacaccaaagtaactattattacccaatggcccgggcggagtgccgaggagatggagaagttcattaccatccctattgaaatagcaatgaactccgtacaaaagaagacggacatacgctctaccaccttgttcggactatcggtggtgaatgtaatgtttgaagatcatgtagacgattttacagcccgtcaacaggtctataatctattgaatgatgctgatttgccggaaggcgttactccggaagtacagcctttgtatggtcctacgggagaaatcttccgctatacgttgagaagtgagaagaaatcggttcgtgaactgaagaccattcaggactgggtgattgagcggaatttacgttccgtatccggtgtggccgatattgtaagtttcggtggagaggtgaaaacctttgaggtcagtgtgaatcccaaccaattgaggaattacgatatttcctctctggagttgtttgaagccatagagaaaagtaatatcaatgtcggtggtgatgtgatcacaaaaagctcccaagcctatgttgtccggggtatcggactgattaacgatgtggaggaaattggaaatatcgttgtgaaaaatgtgaaaggtactcctattctggtgaaacacctggcagatgtgcacgagtcctgtttaccccgcctcggacaagtaggccgaatggatgaagatgatgtcgtgcaaggcattgtcgtgatgcgtaagggggagaatcccggtgaagtgattaaagccctgaaagaaaaaatagcctatatcaataaagaagtgctgccatcggatgtacagatcgtacctttctatgatcgtgagaacttggtagatctggctgtgagcacagtgacacgcaacctgatagaaggcatcctgtttgtgactttcattgtgttgatatttatggcggattggcggactaccgtggtggtggcagtggtcattccattagcattattatttgctttcatttgcctgcgtataatgggtatgtccgccaatttgttgtccatgggagccattgatttcggtattattatagacggtgcggtggtgatggtcgagggtatctttgtagttcttgacaagaaagcgcgtgaagtgggaatgccggcattcaatgtcatgtcaaagatgggattgatccgtaatgctgccaaagataaggcgaaagcggtctttttttccaaactgattattatcaccgcgctgattcctattttctctttccagaaagtagaggggaagatgttttcaccgcttgcttttacgctgggttttgccttgttgggggcattggtgttcaccttgaccctggtacccgtactttcggccatgctgctaaagaagaatgtacgcgaaaagaataacaggttcctccgctttgttaatgagaaatcatccgccttgtttgatgtctgctatgcttatcgcaaggtgacgattacgattgctacgtttgtggcagtggtgggactgtatgcgttttctttcctcggaacggaatttcttccccagttgaatgaaggctctatctatatccgtgccactttaccgcaaagtatagctctggatgagtccgtcaatctggcaaacaagatgcgggcgaagctgagaagctttcctgaagtgaaacaggtgatgtctcagaccggacgccccaatgacggaaccgatgccaccggattttataatatcgagtttcacgtagatatttatccggaaaaggactgggaaagcggctttaccaaactggaattgattgacaaaatgcagcatgaactggagatttacccgggtatagactttaacttctcccagccgattacggataatgtggaagaagcggcttccggtgtaaagggttctatagctgtgaaagtcttcggtaaagatctgtatgagtccgagaaaaaagccgtagagatttataaaatattgggaaccgtggatggcatcgaagatttgggggtaatacgaaatatcggacagccggaattgcgcatagaactggatgagaataagctcgcacgctatggagtggctaaggaagatgtacagtccattatcgaaatggcgattggaggtaagtcggcttccttgctttacgaagatgagaagaagttcaatatcatggtgcgttataaagaggaattcagatgcaacgaagatgaaataggaaaaatactggtgcccgctatggatggtacgatggtgccgattaaggaactgtcggagataaagactatcaccggccccttacttatcttccgtgataatcatgcccgtttctgtgccgtgaaattctcggtccggggtagagatatgggaactgccgttgctgaggctcagaagaaagtgaatgccgcagtgcatttgcccgaaggatatactttgaagtggactggagattttgaaaaccagcaacgtgctactcaacgtttggtgcaggtggttcctgtcagcattatcatcatctttattattcttttcatcctgttttccaatgcacgggatgcaggtttggtattgctgaatgtaccttttgccgctgtgggtggtattgctgccttgctcataacccgctttaatttttcgatctctgccggtatcgggttcattgctctttttggtatctgtatccaaaatggagtgattatgatatccgatatcaaacacaatctgcaggcgaggttggcgttgcccgatgctgtaaaaaccagtgtgcgttccagggttcggcccgtgctgatgacggctgcaatggcggctatcggcctgatgcctgcggcgctgagtcatggaatcggttccgaatcgcagcgaccgctggccattgttattatcggaggtctgatcggggctactttcttcgctttgtttgttttcccgttgattgtcgagatcgtttatggtaaaatgttatatgataaagacggtagattgaagcagaaaaaactataaaacgtatatttgtgctttctttaagttttaaaaactatggcaaagatactgttggtagaagatgaagtcaatatagcctctttcatagaacggggattgcaggaattcgggcatacggtttctgtagcttataatggtgcggatggttggcagctggctcaggacgaaccttttgacttacttgttctggatataatcatgcccaagatgaacggactggacctatgcaggcagtaccgccaactctatggatacgattcccccgtcattatgcttacggccttgggtacaacagatgatattgtaaaaggactctacgcaggtgccgatgattatttggtgaagcctttcagctttcaggagttggaagcgcgtatcaccgctttgctgcgcaggagcaaggagaaaagaacttcggagcttgtttgtggtgaccttatcctcgattgcaataccaggcgtgcccgtcgtggtgaccatgaaatggaactgacggtaaaagaataccgacttttagagcacttcatgaataaccagggtgttgtgctctctcgggtgaatctcctgaaacatgtatgggataagaattttgatacgaataccaatgtagtagatgtgtatgtgaactacctgcgtactaagattgataaagattatgaaaacaaacttatccatacggtggtaggtttgggctatattatggaatctcattaaacggagaatcgtagtgaagataggaagtaaaatagcgttgttctatacgggtatcacaatatgtatgcttacctgtatcatggttgttttctattttttcatttataactatatcaataggctgtacgattcttacctggcagataaagcctatcttactgcccagaaacattgggaaaaggatgaagtagacgagagtagttatgaaattatccgtcaggaatacgaagggcttcttccccaggctaaggaaattttactgaataccgatagcatggagactgtgaaagatacacttgataagtatctgaacaaagagcagcagaagcgactattcatggaagagccggtttcattctgttataaaaaagaggtgggtgcggcattgtattacccggataatgaaggtaattttatagttctgatacttgcccggaacaactatggaacggagatacagaatcatgtgcttatcctgatacttcttttgttcattttcagttccatatcggtttatttcattggaaggttttatgccaatcgaatgttggcaccggtgaagcgtattttgaaagagctgcggcgcatccgggggaataatctgaatatcaggattaagacagccggtaaccatgacgaactggacgatctgatcacttctatcaatggtatgctcgaccgcatagacgcggctttcaagtccgaaaaatctttcgtaagcagtgcttcccatgaacttaataatccgctgacggccattcagggagagtgtgaaatcagcttgctgaaagaacgttcgccacaagaatatatcaaggctttgaaccgtatttcggatgaaagcaaaagaatcagcttgttgataaaatccctccttttcctttcgcatcaggatgaagaacttctgaagaataatatggaagatgtggacctggcagaacttctgatcatactgtgtgccgagaatgagcggatgcagttcagtaatacatttcagaaagagaacctgccagtggtaagggctaatctgcatttgctgaaaatagcaatccgtaatatactgaacaacgcctgtaaatattccggtgaacaacctgtagccgtgcggctgtatcctaaggaagggaacactattttggaaatagaagacaaaggtattggcattcccgaagatgaaatacagcttattttccaggcattctatcgtgcaaccaatacaagggaatattcaggtcatggtattgggctgggactttctttgaagatattatctatttatggagcgaggatggagattttatccaaactaaatacgtatacgagagtgttgataacctttaagtgactaatcattagactttggttttaaaataaaatgtatctttgtgccggtcaaaaatgctatggagtatatttaatatagatattatgaaaaagaaaaacactcttttactttttttgtgcttgttcagtctgtgggcagtggcacaagaaaagaaacctgtaaagattgcctgtgttggaaacagtatcacttatggctcaggaattaaaaatcagtttcagaacagttatccgggggtactttcccagcttttgggtgaagggtacgatgtccgcaatttcggaattagtgcccgtgtattgttgaataagggagatcatccttatatgcacgaacagaagtttcgtgatcttttggcatttcagccggatatcgttaccattaaattgggaacgaatgacagtaaaccctggaattggcgttatggaaaagattttaagaaggatttgacggaaatgctggatattcttcaggaattgccttccaaacctaagatatatctttgtctgcctgttcctgccgtaaaacggaattttggtattaacgatagcgtaattacaaacggtattattcctgtaatacgcagtgtagcgaagaaacgtcatctgcccgttgtggatctttatgcactgctgaagccatatcctgattactatacagatggtatccaccccaatgaacaaggagctgcattgattgccggtgaactttatcgtacactgaccggtaatgaggcgcctgcaattgtcaccgatcaacctttccccggtaagaagtcgcaatgggaagggttcgatcgttatgattttatttgtaatgcacgccgcgctatcgttgttgctccccgcaaggtagcggaagggcgtccctggatatggcgtcctgcatttttcggagctttcccttcggtagataaggctttgttggaaaaaggtttccatgtggcgtattatgatttgactcatctttatggaagtccgcgtgcgcaacgcctgggcactgatttctatgaagtcatgcgcagatattatcgtctttctcccaaagtgacattagaaggcttcagtcgtggcggattattcgcatttaactgggcggcaaataatcctgataaagtggcctgtatctatgtggacgctcctgtatgcgatatgctctatttctccgagaactgggaacgtgatttctggaaaggcttccttgcagaatggggattgactgaagaaaatgccaaagacttcaaaggaaatccgattgataacctggctccattagcggctgccggtattccagtgatgggcgtttgtggtgatagtgacaagattgtgccgtatgaaaagcacatgaagattgctgctgaacgttatcgtgctttgggaggtaatgtcgaaatcatactgaaacccggttgcgatcatcatccccatagtttagataatgctgaaccggttgttgattttataatccgtaaccaaccggattatcagaagaaacaagtgatccatcaacgtggtagccttactaactcttatctgaagtttgcaaaagagaaaaaaggttgtgtcgcttttctgggtggttccattaccgaaatgcgtggttggcggaatatgatacaggaagatttgaaacagcgtttcccggaaactgaatttacgttcattgatgccggaataccttctactggaagcactcctcatgctttccgttttgaaaatgatgtgttgcagaaaggaatgcctgatttattatttgttgaggctgcggtaaatgatgatacaaatggattcgattatatccggcagacgcgcggtatggagggtattattcgtcatgcccgtactgtcagtccggaaatggatattgtcatgcttcactttatttacgatccattcatacctttgttggacaagggtatacaaccccaggttattatgaatcatgaaagtgtagccaatcattattatgtttcctctatcaatctggcggaagaagtggcgcagcgtatgcgcgatggtgagtttgattggaaagaatttggtggcacacatcctgcatggaacggtcatacatattatgctgccgctattaaccgtctcttcgaccttgaatggagtggtgacgtggcgaagaaaaccgtccgggcacatgaggtgccggaaaaaccgatagattcctattcttatgataaaggtgtatttgcggatatccgttccgccaagcaactgaatggttggaaagtggtggatgactggacgcctacagtgaaagggaatacccgtaaaggtttcgtacatgttcccatgttggtggctgaccgtgccggagccagtctttcattctcttttgaaggacgcgctgtaggtatcttctgcgcagccggtccgcaagcctgtgtgctggaatacagtgtggatggcgctccgttcaagaagctggatacatttactgattggagtcggaacttatatattccatgggtgtatatgctggaaacagaactggtttccggtcggcataccttgcgtttgcgtatagccaaaggtgagagaaccgggtgtcagatacgtaatttcgtggtgaatcagtaagtctttatcccctttacagtacctctgtgagggggataaaaacaaattgtacctttattagtaacatttcaggagcgaggattaaccaatctgtctcctcttcataacattcttttcaaagtctttcaacttcattccatacatttgtcgtggtttcttttgtaaacgaaaaagaacacaataaaatctttgatattaaccattaaacaatgtacaatgagaaagacattctttgaaaagtgcataaatttgcatttatgccgtgttgcattggtactgctacttctggtacctgcaatcagtagtcttcaggctatcccttctcaaagcaaaaccatttcgggagttgtgacatctgccacggacaatgagccgttgattggtgtcagcgtccaggtgaaagagacttccaccggtggaataaccgatatggacggtaaatattccgtaacagcccaaaccgggcaaacgctggtattctcttatatcggctacaaatctcaggaatttaaagtaggtgattcttcggttatcaatgtttcattaaaagaagataccgaaatgctggatgaagtagtcgtggtaggttacggtgttcagaagaagaagctggtaaccggtgctacggttcaggtgaagggtgaaaacatagctaaactgaacacgacgaaccctctctctgctttgcagggacaaacacccggtgtgaacatcgtctctacttccggacagccgggtgccagcatgagtgtaaccattcgtggattgggtacggtgggcaattctcagcctctctatcttatcgatggtgtgggtggcgacatttctactttgaatcctgctgatattgaaagtatcgatgtattgaaagatgcagcttcggctgctatttatggtgcgcaggctgccaatggtgtagtgttggttactactaaaagtggtaaggaaggtacttgcagaatcagctatgatggttttgccggttggcagacgataggtcgcaaatacagtatgctcaatgcatcagagtatatgagtattatggatgaagcccgtctcaactcaggcatgtcgccggtggattgggcttcgcttagctccatacatgatgccagggggaatatatatgatactgactggattgaccaggccattgaagatggcggattaactaccagccacaacctctcgttcacaggtggttccaaaacttctacttatgctatttcaggtggctacactggtcaggatggcctgattggtggctcagatgtttcttattataaaagatataacttccgcgtcaactctgaacataagatgtggaacggactggtgactgtgggcgaacatgtgggttttgtctggaaagacacacgaggcatgggtacgggaaacatctggaataacaacctgcgcagtgctttctccgcatctcctattattcccgtttatgatgctgatggcaactacaattctacggtaaactccgactggaatgtaaacgatggtaatccttatggaaacatgatggtgaatcgctataacaacagcaagaatggttcgctcgatgccaacgtatatgtgcagattgaacccatcaaaaatttgagatttaaaacggtctacggtatcagctacggcgcttccgaataccgtgcctatacaccgaagtatcagtttaccccgcaaacggccaacaccgtgagcaaagtgaatcaaagtcatggtcacggtctgtcgatggtgtggaccaatactctctcttacgatttcaatattgctactgaacatcatgtcaatgccttgataggtagtgaattgtctacctatgatggtagtaataccgaaggctccaatactggccttatccccggattcgatgattgggatcatgcttatctggtaaataccaacggtacggaaaataagacagtgaaaggttctccttacgactctacccgtggtatgtcatatttcgctcgtttgggttggacatggaaagaacgttatatggtgaatgccaccatgcgtgccgatggctcatcgaagtttgccaaaggtaaccgctggggatattttccttcagtatctgccggatggactatctccgaagagaagttcatggaatcggtgaaatcctggttcgatttcttaaagatacgtgtcagctggggacaggtaggtaatgccaatatcaactgctatcaatatcttgctcctgtgtccaccacgaataccaattataactttggttccggtggaggtcaagatgcctgggttacgggttcttataccagccgtctggccaatgaaaaagtgaaatgggagacctctgaacaatataatgtgggtatcgatgcccgtttcctgaatgggcgtctcgcacttactgccgacggttatatcaagaataccaaggactggttggtacaagctcccgtattggcaacggcaggtaccagtggccctattatcaacggtggtgatgtgaaaaaccaaggtgtcgaactggggctctcctggaatgaccaaatagggaaggatttcacttatagcgtaggtgccaacttagcatacaaccacaacgaagtgggaagtatccctaccgaagatggtattattcatggtgctaccaatcaaatctatagtaatgcggaagagttctaccgtgctgagaatggtcatgctataggttacttttggggcttcaaaacagccggtatttttcagaacaaacaggagattaatgattggattgctgccggaaatggtgtgtaccaaagcagtgtacaacccggtgatgtgaagtatgtagatgtgaatcatgatggtgtcatcgacgccaaggataaagtagacttgggtaacggacttcctaaatacacattcggtttcaatattaacttgggttataaaggtttcgatcttagtctgaacgctaccggtgccgccggtttccagatagctcaatcttatcgtgatcccagctcctcacagtctaattacggtcgtcagatactgaatcgctggacgggtgaaggtaccagtaatcggattccccgtgtaacctatggtgatgtaggtaactggcaattctctgatctctatttgcaggatggtgactacatccgtttgcagaatattactctgggttatgacttcaaacgtctcatctcttggaaggggctgtctaaattgcgcctctatgtgcaggctcagaatctcttcacactgactaagtatgatggtatggatcctgaaatcggttcatacaacggtacagacggtaacaaacagaattcagacggtacgaccaaccagacatgggtgtcgggagtagatatgggttactatccacacccccgtaccttcattgtaggtattaatcttgcgttttaaatcatgaaaaagaaaagtaatatgaatacaaaacatatattattaacgagcgcgctcgttgtgtcagctttagctttcacgtcgtgtgaagacttctttgacacttcatcaaaaaaggatttgaacactgaaacggcttacagtaatttggaatccgcagaaatggctttagtgggttgttatgatggatggcaacgtactatttcagatgaaggagtaggtatgtatttgctggcggagtttgcttccgagcaggcttttgcaggtcttggcctttctgatgctaaaaacaacaatgtgattgaccagttcaatctggggatcgctccttcatacaatgatatctttaatgtggattggcagaactattataaagctatattccgttgtaatcagctcattgttcaggaagataatatcgactgggcaggggacatcaaggcacaaggacgagtgatgggagaagcacatgccattcgtggtattctttacttcgatcttgtacgtatgtttggagatgttcctttgcttaccgctccttccgaagagaatattccccgttctccggcaagtgatgtttatcagctcattttcgaagactttaaatatgccatcgaacatattcctgccgatgcttatcccttggataataacgatactaacgatggtcgcatcaccaaatatgcggcagaggcattgatggctcgtgcctatctttaccataccggttactacggtgccgaacatccttcatgcaccaaggctgaggcagtggctgctattaacgatgtggtgcagaatggaaaatatgaactggagaaaaactatgccgacttctggatgcctgcttgtactactgatgcttcgagtggcgacacttatgcctggaatacgacatacgccggcaagtggtatgacggctccgcttggaaagccggacaaggcaaactctcaagggaaatagtgctcaacctgaagatgaatactactcatgactataacggtaatggtgatggtaatacgttctcggtctatttgggaccacgtaacaggaatgctacgagcgtatgcattgccagcggctggggcgcttgtccggtgactcccactttcgtggagcaatataagaatgatccccgtttcagcgcttgtgtatggagttgtagtgaggccggttttgatgctgacattaccgattcgtatgaatataccggttattatacccgcaagtatgcgccgatgtgttttgccgatggtacacgtcaggaagtaggatttaagttgggtgaacagcatcagaatgttacttactatcaggattacactatcatgcgctatgctgatgtattgctgatgcattccgaactcaatggcaatgccgatggattgaatcaggttcaccagcgtgtatatcccggtgaaacactggcttacagtattgaaaacatccgtaaagaacgtgctattgaactggctttcgagggtgttcactattgggacctgatgcgttatgagaaggatggtgcatacgctgcacgtatcattactgccgcacaaaatggtgccaaggtgacaaatggcggaaatgaggcaaccacttcgttctccgaaagtaacttcacttcgaagaaaggtttgatgcagattcctaatacacaaatcaccctttcgggtaatgtgcttactcaaaatgccggttggtaaatccatgaaggcttaggtttatcaaggaaaaacattaaaaataataagatatgaaattgaatcattatatatattcgctcattgcaggcttggtgctgatgttgtcggcctgttcacccgatgagtatgatatgggtaagaagacctatgtatccgatgacttggcggaaggtattgcctacactgtgactatcgcaggaaatcaagtacgcctcaaatcaaatatcaccggttgtactccgctgtgggttactcctcagggacgttcgcaagaaagtgaacttgccattgaattaccttttgcaggttcgtatgaggtgactttcggcgtagagacgcccggcggtgtcgtgtatggcgaaccctatactttcagtttagcacaaaacgatttctcgttgctggaagatgagaaatggttcctgctgtccgataagaactttaagtcgggtgatgctctgcctgatgctgagacattggctgaaggggttagtaagaaatggtatccttgcgatgcgaactatggtatcggtcagtgttcgggacctgtgatgtatttgtctccttacgatcctgatggtgacggtgctggctatactgaagatgacgaaaagaatctggtttataaggatatcgtctttggcgcaggtaactggaaacccaactgggacccgggatttcaaggctggctcatccccgaaactgatccctatatggattcgtatatgactttcagtatggatgccgccaatggttgcgtggctaccatgtatcgcggtgaggctggggtaaagggggcaagtacgggttcaaacatgaagggtaaattcaatatgaatcttgcagaaaagactaaaccgaccatctcgttttccgattgctattccatgcacaatgtgggcttcgatgaagtatgttccaattacacgcaggatattcagattatagacctcactccgtatatactgcaattagtgaccaaacgtactaatgctgacggtagctggtatattgtatggaactttgtttctgaagaagtgattgaaaccaagggtgaatgcattcccaaagaagatagtggagagattgagaaagtagcccccgtgcttcccacattcgataatcttcttgatgacctcttcacgaccgaaatcaacggtgtgacttatgtcggtaaccagatgacatttaaccttgataccgaagcaccttacgattggttgtggtggaacggttctcctaacgtacagaaatgggaaagtgtaacgggaggtgtgtacaacgactcatgggctcctgctgccggtgatgaggtggaagattttgaacttatcctaagtaaggcttccgatggctcttataattatgaattcggtgaagccagtggtaaggtaagcgttgcaaagggcgtaataaccttcgatagcgaaatcacccttcttaccgcttccagcgatcagcgtacggttgctgttacaagcaaagagtttacggtacttgccatggaggctggtgaaacactggttattggtgttcccgaatcaaaagatgagaatggcgtggtgaattcttatcttgtagctaatctgctctataagaaaataagtactggtggtccggaaggtcctactgtagtaggtattgacaattctactattgccgagcatacttggttggagaatggatgcatccgtattggttttcaccactatggtgatacaggcaccggtgttttcaaagatgtagcctctgttaaattgaagaagaatcagaccatcagtgtgacctttaaaataaatggcggaatcacttggactgctgaacccaaatgcgcattgattgataataatattaagcagacttgggagcccggatgtttcgatcttgatgatgccgtaactgtgaatactaaaggcgaaactatcgttactctgactaatacaaccggagctactgttacgttccttcctacctgtctcgatctctccattcagtacaccgatttcggcaccgctgatatcttggctgaggacggaaatccagattggagcaccgttggatttgagattgtatcttgcaccattcaataaacaatagtatagaaaaatgaagaacaaaatattatttggaataatggccctcgtcatgagtgttttggtgacgggatgcagcgatgatgactatgcgattaatactacagcccttctgaacgactcgtccgtagtaacaggttcggcagatgtgactgccacatcagcaacattacatggtaccgtatctgggcttgaaagccaggcttcaagtgcttatgtcattggttttaattacggtgctgcggccgatgcgctcaccgaaaggattgttgctacgggcggtgaaacattcactgccacggtaaatggcagcttgaatcaaactatttattatcaggcttatgtcactttacaaggcaaagtaacttataaaggtgaagtaaagagccttgtactgactaatgctcgtgctactaccggcgatgctacccagataggtgctaacaaggttactttgtctggttcgcttattggctttcctgcggatgcggaaggtggtatcattgtgtcgggtatagaaggtacggaaaatgtgcgtgccggtgtacgtattgctactgttcctaaggaaagctatacggtagatgtagaaggcttgttggccaatactacttattattatgtggcttatcttgatctcggtgcaggtatggtctatggtgaagaaaagtcattcactacaactgggcatacgtttgatcttgataatgaccttgttgaccttgggctttctactaaatgggcaaagtacaatttaggtgctacctcagaaacggaaattggtggtctgttcggctttggcgataagacaggttttaataccagtatcgatcctgcaagttatgcttctgccgatatctacaaaacagctaatgaccttgcctataaagcatttgaaggtaaagtgaccatgcctaccattgctgagtttgaagaactctttgcactctgtaccagagagtgggtggaagtggaaggtgttgccggctataagttcactggtcctaacggaaactctatctttatgcctgccgcaggttcgcgcacacaaggcactactaccggtgttggtgtggaaggctgctatctttccggttccatcaatgtttctgatactcagtttgccatgagctatcacttcaatagtgctcttgctactcgtgccaccactcctgtctatcaagctttggctattcgtgccgtttctaccgccaagaatgttccgttcgaccgctcgttgctttatggtaaatggtatattgacaatggtcaggatggtgaacaacatgtattcgaaggtccgttcacgcagtggggcaaaacgtacgactgggctatagtatctaacggtcagcccaatatcggaaaagaaattcattgggaaatgggtactgagaatggctggattggttatacttatggagttgattatggttacatggagtttttcgaagacggaactgtcaatatccatcgtttgactgatgacggtgtagctactgatgaaaccggtaaatatactattgatgaggcaaacaaagtgattgacattgatatcaatgtactttgtgccaatacttgggtagcgggaaagagtggtaagctgaatatcctgtccttgacgagtgacggtttgcagattgcccttcctaataccgatgaatatgcttactctgtcaactattacagtcagcgtaaggcagaagccgatgccaagattccggtatcattaatttgtgtagattccagttggggtggtacttggggaactgaggtcgcgcatctgtctccggatgcgttggcaggtcagcacacattcacttacgaaggctcatctaacgatgttgtggtgtttaccctcgattttccggacttgctgaccagatatcctaatgctttcgttcgtattgacgagatgaagtgcgacggcaatgctattcagttcaatgccaataatttcttctatggagatattgagggtaaaggaacctatcgtgtcgagttattcaatatttatggtgtaggtgcggcggatggcaaagtgttgaacagtgctttcagcaattcccagaatatgggttccgaatcggcaccccacttcaacaatagtctggcgattacttatacagtttttattgatggcaatggtgcaggcacgtatacacctaatctggttactattcctaattgggatggtgcaggtacatgggggtataatgccggaggtacattagaagtgaaatatgaaaacttccggtatagtcttgttaccccgcagttcgacatcaagtatgaaggtactggttgtgcagctggttccattatgactttcattgaagtggcagatctttacggtttcttccctggtacgcatgctgtgttggataatctctatcttgatggttcagaggtaacgtttgatgcgacaaaagtgcttgataccaatgatggctccaagtatcgtttggaactttggaactgttatggggcaacaaagaatgcgggttgtgctttcggtacacctgatggagatgtaatcaaggagcttggtttcagcacttctatggaagtgaaatttacgttccataagctttttgctgttcctcaatggtaatagaggagaggatgtaatacattccagagttgggaatatatatgaatagggagtggggaaggcgaagatgcttttcccgctccctattcatttcaaagagtactattattaaagatgctgttatttagcatatcattttgtattttaaactacgcttagaattccgtatttgtaaccaactgacaactaccaagaaaacaagcgaacaaaaacttgtatgctgttaattaacagaactatataaaattcgcaacagttgaaatagactgttttcttccggttttacccgtttccttccatcaattcgcgcttgactatggcagaattccacttcctgcacgaacgatatatatgtccttcgcgcacgacattaacttcctgcgtgaaggagcttaatatccttcgcgtccgatgtatatatccttcacgtacggtattaatatcgtgcagttctccgatgcactttgcttccataaacgtgtaaaatgttgcatgaatattaactcattcatgctcaaaggaggctgttacgctttttttatgcgacctgtatgttagcgagaagaaagaaaattaagacaaaagtttatatattgtttggtttgctgaataaaatgatatattcaagaaacaacctctttgtattttatacaaagtactatttgtaaagtaatagagaaatcttttatttgctgcctgcaagaagttaagagtttgtcaacaagaagttaacttcctgtcgacaaactcttaacttcttgtaaacagcaaattgattatttgtaatactttgatagtcaactgtgaaaaatcggttatggaagtttgggtatgaaaataaatcagataaaattataataggggacaactattccatatctttgttccattaaccccaataatatacatattatggaaaatagtttggatgcaacagtgagtagctttatcgagtaccaaaaccaatttagttcaataatagaaaagttaaaggaagggcatcagaacggtagatttgcagattggaaaggggttattactgtaaacggtcctgttatctatcaaccagaaatattgtttatgggaataaatccgggaccagggctttataatgaaactaattatcggaacaatgataataaggttccatttcggatattgacaggggatagtaatctctaccgggatgagagtgcatatcctttaagtaaacttgtttatcgttcggatggtaaaacgattgcactggactggtttaccaaaagtaattattgcgaaggaagctcatggtatgagctgaaaataaagcgggggaatggtttcgttgaaaatatgcttaaaatcatttgcaaggttgccttcggtttaggtaaaggtgaatttgtgaaaggcgaaaagccagaatggtatgatacattcgggaaagaaataatgtttatgaatgtatgtccgttggctactgataacttgaatcaactctcacgacttaaaaaagaattgggaataaacgaatggaaagatatcgtaaagcctgtaagaaccttggttagagataatattaaacctaaaataattgtatttgcaggaatatccgcatacaacaatttcatgtgggaagataaaggcgatcaaatctttgatattcctgtagttataatagacagaaaacgcggatataactcagaagcaaacttatcgaagatcgcatctgaaatagttgaaagaatatcccaatgaattctacttcttttaagcagtatttatgtttctcagtgcatttgagtaatagttcgacgttacttaaattaaataactatgaaatactcaatagcgcacaatccccctgaataatatgcatttattgcatacttcttatttttggaaacattttacacagagtgttggtcctacgcttggatggaataagtggtggtatatcacaagtctacccgttttgtagcaggaacccgggggaaaggcgataaatgatatgtcgcctattggaaacctttcgtccaggggtaataacaaattatacccttccatataacatcctaaacgctttgtgtggctgctttgccctatctttgccaacacggatttctatccataacctaatatttgagaacgaaaaacataatgctcatgaataaaattaaagcttatctgttgctgttgacgattgctctctctgctttcgctgccgcatgttctagtgatgacaatgatcctgtaacaccggaaataacaatttccgaaaacattctggcgaatggaatgagtttttccaaagccggaggtacaaacacactctctgtgaaatcgaatgtgacgttggaagttaccagtaaccaggattggtgcgtagtgactccgacagtttcagcttctgctacggtctttaaatatacgatagatgtaaaatccaattcaactaccgataatcgtacatctgttattactgtgaaaggtggtaacctgacagagacattcaatgtcattcaaacagctaccgaaggactggatctggagactgtcttgtttgaagacatatcggcagcgggtggtactatcactgtgaaagtgatgactaacggtgaaccaactataactattaatgatagctggattaccgagaaaacagaaacacgcgctatggtggataaaacgaagacttttattatcgctgccaataccggaaaagaacgtaccggtaccattacttttatttttggtgacttgccggcaacaactgtgaccgtgaagcagttggcgggaggtgagataagttcgaatgaaatagcaggtgaagatccctggactgtagctaaaagtctgggattgggttggaatctgggtaatcagttggatgcgcataatagtggtgtggccaatgaaacggcctgggggaatcaaaagacgacacaggctttatttgataaattggctgctgcgggtattactaccgtacgtattcctgttacatggatgggacatattggagacgcccccggttatgaaatagagaaagcctggatggatcgtgttgccgaggtagtaggatatgcagaaaatgccggactgaatgctattgtcaatattcatcacgatggagctgatagtgaatactggcttagcattaaagatgctgctcaggatgaaactaaaaataccgcaattaaaacagaattgaaagctgtatggacacagatagccgaacgttttaaggataagggcaacttcctggcattcgagtcgatgaatgaaattcatgatggcggttggggctggggcgacaaccgtaatgatggtggaaaacaatattcaatattgaacgactggaatcaggtgtttgtagatgcggtacgtgctgtaggtggtggtaatagcaatcgtttcctgggtgtgccggggtattgtaccaatgtggcacttacggtgagcaacttcaaactgccgactgataaagttcagaatcgtctgatggtatctgttcatttctatgatccgaatgaatatacactggatgcaaagtattcggagtgggggcataccggcgctgccgataagaaagctaactggggagacgaagacaatgtgaaagatgtattcaatagtttgaagacaacgtatatagataagggcattccggtatatattggtgaaatgggatgtgtaagccggacgactgaccgtgcggaatctttccgcaagtactatctggaatatgtatgtaaagcagcgaaagaatacggattggctcctgtttattgggataatggcggtacaggtagtggaaaggaagaatcaggcttgtttaatcatgctaccggtgattatctgaataatgcagcggaaatagtagaagtaatgaaaaaggccatctttacagaagatgcatcttatacattgcaatccgtctatgacaatgcaccgcaataggttttcataaatacccctcgtgtatacagggattgttgttaatacaggtttttttttgattggttttgggaagtagcttctgtgagggaagttacttccttcttttctgtccgggaaacaaatgatggggtatgaaatgataaaaaaacacattgaaaaccttgtttttacaattcctttttgtttcatttgcaatatgttaacgatattcctatatctactactatgaagagattgattttacttatcgtttcagtcgttgtggcatgtttttctgccttttcacacgactttatgttcaaacatctagaggttaaggacggaatgcccagcaaccaaatcaatgccatttataaagattcaagaggttttatgtggttcggcaccgctgccggactggcacgttatgacggatatcgtttcaaggtattccggagcactgacaatggttctgcgtctttacctgacaactatattgagaagatagtggaagacagtgaaggacgtttatggatacggacgggagaaaacggatatgtcatttataactgggatacggagagctttgtctgtgatgttcgttcccggatgtgggatatagggatagacggaacaccccgctatgtatttgtcgacaagcaaaagaatacctggtttgccatagacgggaaagggtgctactgttatcgtcccggtgaaaagaatgctgtatccttgcctttcggtgagaaaggaatacccgaaggtgtcattatagacatggccgaatgtaaagatggcattctgttggtatatgataacgggcgtgtaatctgtatcgaccgtgagacggtacgtgtaaaatggactttgacagatattgcagagcacatgggaacgcgtactgatatcttcttcctgtatgtggataaggatgaagatttatggatatatggtgccccgggtgtatgggcttacgatttgtctgacaggaagtggcattcacaatggaatttcagcgatagaggtcaggcgcatatcgtagcagtagctcaggataagcagggacgtatttggtttggaaaggaccaggatggcatcgatatctggaataaggcgactggtgaaactgtctcgcttacgtatgatgtggatgacgaacgaggtttgcccaataataccatcaatgtgctttatgaagatgaaggcggtgtgatgtggataggtacttataagaaaagtgtggcttattatgatgagggcatttttaagttcggcatcaaccacttgggggatattaactgtctggaagaaagtaatgacggttcgttgtggttgggtaccaatgacgccgggttgatacgttggaatccgaagacggatgaaaagaaactgtatgcatactcaccgggaggaaactctattgcttcgaatgtcattgtaagtttgttgcaagctaaggacggcaaactctggatagggacattttgggaaggattggattgtttcgacggcaatcgcttcgtgcattaccggaacagaccgggagatgataattcgctggctaataacaatgtctggtcattggcagaagataagaacggaaatatctggattggaaccttgggaggcggtttacaatgtctgaatccggggacaggtgagttcaccacctataagataagtaactccggaattatttccaatcatatcgcctctttatgtatgagtcgtgataatcgtctgataatcggtacttcttctacgggggtatccataatggatctgactacccggaaaataacgaacctggtaggcaatcagtcgggaagtatccgcttttccaatcagagcattaaccaggtctatgaggatagtcggggattgatatgggtgggaacacgtgaaggactgaatctctataatccggagaacgaccatttacaggtagttcctctttcgcagaacgattctagggtatttattaccggtatcgtagaagatgataataaaaatatgtgggtgactacggccaatggtgtagtgaatgtaattccttctatcgatacaataaacggagattatactttcaactattacaggtatgatgataaggacggtttgcagggctgtgagttcaatcaacgttccattaagcgtctttcctcaggtgagattgcaatgggaggtatgtatggattgaatactttcagaccggagaatatcaaatataaccggacgttgcccaaggtgatgtttaccggcttccagcttttcaatgaagaagtagaggttggaaaggagtatggtggacgtgttttgctgcgtgagtcgctgaataaagccagagaggtgaaacttgattataaacagaatgtcttcactgtattgtttgcatcggataattacgtcttgcctgagaaaacccagtatctgtataaactggagggatttaatgaggactggatggcaggtgcggctgatatgcaccgcgttacttatacgaatttggcacccggtacttatacgctgaaagtgaaggcaatcaatagtgatggatttgccggaacagaagagtcaagccttaaaatagtaatcctaccgcctttctggatgaccccttgggcgtatgttctgtatgctatgctattgataggcacattgcttctggcccgcaatgctgtgctgcgccgtgaacgcaataagttcaggatacaacagatggaacgtgaagcggagcggaatgaagaagtcaatcagatgaaattccgtttctttaccaatgtgagccatgaactgcgtacaccgctgacgttgatcatttctccgttggaaggaatgatgaaagaaacccatgatgaacggaagcaggagcaattgaaactgatgcatcgtaatgcattgcggttactgaatcttgtgaaccaattacttgattttcgtaaaaatgaggtggcagggttgcatttgaatctttcggagggggaggttgtatcgtatgttcactctatatgcaactcattcctgatgctttcggaaaagaaaaacgtgcatctcacttttttctcggcaatcgaatcgttgaatatgtcgttcgatgaggataaaataggtaaggtagtgatgaatctgctctctaatgcgtttaagtttactccggatggagggcgggtggatgtttctcttgaactgataaaaggaactacagaaacattggaaatcaaagtatctgatacgggggtaggtatcagcgaccttgataaagaacgtatattcgaacgtttctatcaatcggagcgtataggtgatagtaaccccagtacggggagtggtatcggtttgagcctggtacgtgattacgttacgctgcatggcggtgtggtgcgcgtgttcgacaatgtgggtacgggcagtgtatttgtggtagatattccggtgaaacattcggtggtgaacgtagcgactccactctcggaagaagctgcagaagaggatgcggtggcacttgcttcagtggaagaattgaatgaggaagaacggaagaagccacttgcattgattgtggatgataatgaagattttgtttctttcatgcgttatacgttgagtctgtatttccgtatagaatctgccggaaacggaaagatagcctggcagatgataccggaactaatgccggatatcatcgtttgtgatgtgatgatgcctgaaatggacgggaacgaactgtgccgttgggtgaaggctgacaagcgtacaagtaatattccttttgtgttgcttacggccaagcaatccgtagagaataaggtggaaggtctgacgattggtgcggatgactatgtgacgaaacctttcaatatggaggtactgattttgcgcatgcgtaaactgatagatttgagcagcaaaaataaacttcgcacccgtattgatcccgaaccgagtgaaatcgttatcacttcgatggatgaaaagctgattgagaatgcgataaagtatgtggagacgcatattgcccgtcccgatttatctgtggaagaattgagtcatgaactgggcatgagccgggtgcatctctataaaaagctgttgcagattaccggtaaaactccgatagaatttattcgtattatccgactgaaacgtgcggcacaacttctgcgcgagagccagcagaatgtgtcggaggttgcctatcaggtgggcttcaataaccccaaatatttcagtaagtatttcaaggatgaattcggcgttttaccctctgtatatcaggaaaaggagggtaaataacaaaaagcacccattgttgaaacatctgatatttctataaatcaaataagccctttcctttcaacatcgggagggcttgtttactgtatgatttcctacttttacactcggagaaaataactttaaaaacaaagatatgaaattgaaaaacacttcagtttgtttgctcgcaggatggatgctgatggcatgctccggaggcgggtatgagaagacgagtaacggcattattgtaaatgtcgaacaacagcaaccgacggatgtgcgaaaggtgaaggttgaagtaatgggagagaagttgattcatgtgtcagccactcccgaaaaaaacttttcaaaggcggaaagcctgatcatagttccccaaaaagataagacggacttcagtgtggaagaaagtgaagatgccgtttcggtaaaaacctcagaggtgtgtgccatcgtatccaaagctacgggtgaagtacgctttaccgatgcttccggtaacctgattttggcggaagatgagaaaggcaggagtttccagcctatcgaagtgcagggaacaaaggcgtatacggtacgtcaggtattccagtcacccgatgatgaggcattctacggactgggacaacaccaggctgatgaattcaactataaaggtaagaacgaggaacttttccagtataatacaaaggtttccgtaccttttatcgtttccaataagaattacggtattctgtgggatagttattcgctttgccgtttcggcgatccacgtgattatgcacagttaagcacagttttcaaactctatgataaggagggtaaggaaggtgctttgacaggaacatacgtaccctctcagaaatcaacagcggagacactggtacgccgggaagattctgtttattttgaacatctgaaatcggaagatttgtcgaaagtcgtgaacttaccagaaggatttcctttcatgggttcgcaggtgacgtatgaaggagaaattgagccgatggagagtggtaggtttcgttttatcctctattatgcaggatatacgaaggtatatattgacggtgaactggtggttcccgaacgttggcgtacggcttggaatccgaacagttataagtttgccgtagatttgaaagccggtaaacgtgttccattgaaaattgaatggattcctgatggatatgtatcctattgcggtttgcgtgcattgtctcctgtatctgctgaagaacagaacaaacagtcgtggtggggagaaatgcagaatgaaatcgattattattttgtttatggcgaggatatggacgaggtaatcagtggataccgtgctctgaccggaaaatcacaaatcatgccgaagtgggcgatgggatactggcagagccgcgaacgttataagacgcaggaagaaatactggatgctttgaaggaattccgtaaacgtcagattcccattgataatattgtgctcgactggagctactggccggaaaatgcctggggtagtcatgagttcgacaaagctcgtttccctgatccgaaaggaatggtagattctattcatgctctgaatgccaagatgatgatttccgtttggccgaaattctatatgactacggaacattataaagagtttgatgaaaaaggctggatgtatcagcaggccgttaaagacagtattcgtgactggattggtcccggctacatcggttctttctatgatgcttatgctgagggtgcacggaagctgttctggaaacagatggaagatcatctttatcccctcggaattgatgcctggtggatggatgccagtgaaccgaatgtacgcgactgtacggatttggcttaccggaaagctttgtgtggtccgactgctctcggtccgtccgaccaatatttcaatgcgtatgcgttgatgaatgctgaggctatttatgacggacaacgtgccgtagacaatgacaaacgtgtattcttgctgactcgttcgggatttgccggattgcaacgttattctaccgcaacatggagtggcgatatcgctacccgttgggaagatatgaaggcgcagatttctgccggactgaattttgcagtcagcggtattccttactggacgatggacattggcggattctgcgtagaaaaacgctatgaagacggacaaaaggaattcaataagaccggaaaagagaatgcggactataaggaatggcgtgaattgaatacacgttggtatcagtttggcacattctgcccgttgttccgtgcacatggacagtatccgttccgtgaggtgtggaatatagctcccgaaggacatccggcttatagttctatagtgtattatacgaagttgcgctatacgatgatgccttatatttattcattggccgggatgacttattttgatgattatacgattatgcgtccgctggtaatggactttacggcagatacaaaggtgaataatatcagtgatcagtttatgttcggtccggcgttgatggcggctccggtgtatgagtatggtgcacgcacccgggaggtctatttcccggcaacttgcggttggtatgatttctataccggtaagtacatggccggtgggcaacagttgaaagtagacgctccctatgaacgcatgccgctctatgtacgcgaaggggctattgtgccttacggaccggaaatgcagtatagtgatgagaagcctgcggaagaaatcacactatatgtatatgcgggtaaagatggtgagttcactttgtacgaggatgaaggtgtgaattacaactacgaaaaaggacagtatgccaccatcccgtttacttacaatgatgcggaaggcactctgactattggtgaccgtgcaggagaatttcccggtatgctgaaagaacgtacattcaacgttgtaaaggtaagtaaggataagccgcaaccttttgacgcgaaggctaagggggtgacggtgaagtatgatggtaagcggcagagtgtgtcaatatcatgaaacagctattaataataccaatatcctgtttgctcctcttcttggtattgggaggttgcacctccgctgaacgggttactgataaccgtcgacaggacttcaccgctgactggactttccatctgggagatgactctgcggcatcccgtcccgattatgacgacacggcatggcggatcctccatcttccacatgattgggctatcgagggagagttcagcagggataatccttccggaacaggaggaggggcattacccggtggtatcggttggtatcgcaaaacgtttactgttgacaaagcggatgaaggcaagcgcctgtatattgattttgacggtgtatatatgaattcggaagtctttatcaatggtcattcccttggtgtacgtccttatggatatgtctcgttcagttacgatctgactccccatatcaggtggggtggaaagaatgtagttgccgtacgtgtggacaatgcggaacaacctaattcccgctggtattcgggatgtggcatctaccgtaatgtatggcttacgaaacttaaccccgtgcatatagcgcaatggggtacttttatcacggcgcaagatgtgtcgaagaacagtgcacgactaaatatacgtactaaaatacagtatgatgcggccgctcaactgcaagattccgtgaagcaggcggatggtacgtatgttgtttttgattcggaaattgtttccttggcagatgttgtgttgcagtcacggctgatggatgcagaagggaatgttgtgggtgaggttgcatcggaactgcaagtgatacctgcctgtccgaacgaggtagaacaggaaattgtagtgaagaaccctaatctttggagcgtgaacactccttatatatataaggtgaacagtatccttattgataagacaaccggtaaagtattggataactactgtacgaataccggtatccgtaccttccgttttgatgtacagaaagggtttattctgaatggagaacggctgaagattaatggtgtatgtatgcatcatgatctggggtgtcttggggcggcagttaatatccgcgctatcgagcgccagttggagatactgcaagaaatgggctgtaacggcattcgctgttctcataaccctccctcaccagaactgctcgatctttgtgaccgtatgggatttatcgtaatggatgagacgttcgatatgtggcgcaaaagaaaaacggttcatgattattcccgttacttcaacgagtggcatgaacgcgatctgacggatttgatacttcgcgaccgtaaccatccttctgttttcatttggagcattggcaacgaagtgctggagcaatggtcggatgcaaaagcggatacgctgaccttggaacaagcgaacctgattctgaattttggtcatgatcagagtatgctggcgaaagaaggtgagatgagtgtgaactctttactgacgaagaaactggcagatatggtaaaagctctcgattctactcgtcccgttacggctggctgtaatgaaccgaacccgaataatcacttgttccgttcgggagcattagatctcatcggctttaattatcatgatgattggtttgccggtgtacctgagaaatttcccggtaaaccgttcattgtggcggaaagtgtatcagcactgatgacgcgtggctactaccggatgccgagtgacgaaactgttatttgtcctgaacgttgggataaaccttattttgatgatagtttctcctgttcttcgtatgataactgtcatgtaccttgggggaacagtcatgagggcacgatgcgccacgtgaagaataatgattttatcagcggacagtatgtctggaccgggtttgactatttaggtgaaccgactccttacggttggcctgcccgtagctcttatttcggcattgtcgatctggccggttttccgaaagatgtgtattatctctatcagtcggaatggcatccggagaaaaaggtattgcacctttttccgcattggaactgggcgccggggcaggatatagatatgtgggcttattataataatgcggatgaggtcgagctttttgtaaatggcgagtcgcagggtgtgcgtacaaaaggtaaggatgattttcatgtcgtatggcgtgtgaagtatgaaccgggtgtggtaaaagtcgtttcccgcaaggatggaaaaacggtattggagaaggagatccatacagccggagaaccggcacagatacgcttgacggctgatcggaatgaaatcaaatcagatggcagagatcttagttttgtaacagtggaggtgttggataaagatggtaatctttgtccgaatgccgataatcagatcatgttcgatgtgcaaggtgcgggatttattgccggtgtagacaatggtagtcctgtttcaatggagaaattcaaagctgattatcgcaaggctttctatgggaagtgcctggtggttgttcaaagtgacggaaaatccggaggcatcaaactgacggctacatccgaaggattgaaaacggcagtgaccgctattaaagcaaaataaaagtaacttgttagcagaattcatttataacgggaaaggaatgaataagactcaccacagattacacagattcacacagatttattaatctaataatcagtaaaatagaatctgtgtcaatctgtgtaatctgtggtgaattaattcataaccgaaaagaaatgaatgaattccgccaacgactaaaagtaatatctttaatgtaataataatgaagaaacaactcttttcaactctcctgtttgcctgttcattgactactttgacagcgcaaactcctgtatatttagatgatacgcaacccattgaagcacgtgtaaaagatgctctcaaccgtatgacactggaagagaaagtagccctttgccatgcgcagagcaaattcagcagtcccggtgtgccccgtcttggtatccccgaactttggatgagtgatggacctcacggtgttcgtgcagaaatcaactggaacgattggggatatgccaaatggactaatgacagtattactgcttttcctgccttgacttgtcttgccgctacctggaatccggaaatgtccgccatctatggcaaggctattggtgaagaagcccgttatcgggaaaaagatgttcttttggggcctggcgttaatatctatcgtactcctctgaatggtcgtaactttgaatacatgggggaagatccttatctggcaggcgtgatgtgtgtaccttatattagggagatacagaaaaacggggttgccgtaagtgtgaaacactatgctttgaacaatcaggagttatggcgtggacacattgatgtgcaactaagcaaccgtgccttacacgaaatctacctccccgctttcaaggctgctgtgcagaaaggtggtgcctggaccgtgatgggggcctataacaaggtgcgtggtcagcatgcctgccacaatgatcttttgctgaataagatattgaaaaatgactggggttttgacggtgtagtcataaccgattggggtggtgcccatgatacttacgaagcagccatgaatggcttggacatcgagatgggatcctataccaacggtctgacctcagaaagtgtatttaccttcgacgattattatctggctaagccttatctccggatgttgaaggaaggtaagatgcctatgagcacagtggatgataaagcctcccgtattcttcgcttgatattccgtacggcgatgaatcgtcagaaaccttatggttcgctgacaagtgaagagcattatcaggctgcccgtgagattggtaatgagggtattgtgcttctgaaaaacacacctgtccagaaaaaaggtacccctttgctgccgcttgatgactctaaatatcaacgtatactggtagtaggtgacaatgctgtccgcttgttgaacgaaggaggcggttcttctgaactgaaggtaaaagatatgatatctccactcgatggtatgcgtgctctttatggtgacaaggtagtttatacgaaaggttacgctgccggacgtccgatgtatgggcgtgcagaagaaattccccagtcggtgatggattccttgcgcacagcagcaactgaacttgccaaagaagccgatcttgtgattttgttcggtggattgaataagaatcatttccaggattgtgaagccggtgaccgtgtgacatacggtttgccattcggacaaaatgaactgattgaatctctgttgggagtcaataaaaatatggtattggtattgttgagtggtaatgccgtggaaatgccttggctgaataaagttccggccgtcctgcaaggctggtatctgggatctatgggtggtaattcacttgctgatgttctgagtggtgcagtgaatcccagcggaaaacttcctttctcctttcctgtgaaattgacggattgcggtgcacatgcatttgacgaattgagttatccgggtgatagtatcaagcaggtctacaaagaagatattttggtaggttatcgctggcatgataccaagaagattcccgccttattccctttcgggtatggtttgagttatacgacttttacctatggtaaaccggtagcttctgctaaaacaataactgctgacaattctctgactgtgaccattcctgtaaagaatacgggtagtgttgccggaaaggaagtcgtacaactgtatgtaggagatgaaaaatgtagtgttctgcgtcctgtgaaagagttaaaggcattccaaaagataactttggcaccgggtgaagaaaaagaagtaactttcaccatcactccggatgatttgaagttctatgatgaaactgttggcggatggacggcagaaccgggtaagtttaaggcttatatcggagcctcttccgcggatattcgtggaacgattccgttcgagttgaaataagatagtgattgctgaatggggaaggggtgtggagtgttttcgcatttcttctccatttattatattcccctttatataagccctttgcagggctttttttcgataatatctatcgaacctacagttagaaattactttttatttttctgtaaaatcaataagtttatcaggcaacttgtttcataaacttacggattcatctgtcacagtatgtctactgctgtggatgttttgcaaatctttatctattttcttaggtatttctattgtttttattgagaaggcttactacttttgtatgcggacgtcacaggtatgggagcttactgtccaactacaaatgtggtacgtccgtatgcaaacttcttactgcttgacgaagtaaatagctcattgtgtggtagctcaactcatagaggtttgcttaatagacctttacttttagaggatatttcgtttctttcttggaatgaagtgaacattagtagttaatttacgaagttaataacaaataaaaaggtattcagttataaggaatacaacatcgaagatgaataattctacggaactttccaccctttggacatttttagacaatataaccaataatctgaaaagtcagagattagcggatgtattccgttttatttctttttatccttttgagacctatggacctcacaaacatttgcgtattgagattaaccatgttaaaaagggcaattgcattctgtatttggacaatgagagcatcaattttgttgagggtgataccatgatcattctctcgaatgtcaatcatacgtttgaggcaggctctagtggaactactttaatgcagcttgaatttcttcctgagatattttccggttttgatttaaactttccgaattgtatagatggtacgtcaccaaattccatctctcttttctcggaagagaacaagctgattaaaatagtgaataatataggtattatgcgtgtagtacaacgcattgtaaacgaattggaagggaagaattcctattatcaatatttggttgtgatgttttatgcagagttgatggttcttatttatcgttatatggatgaaaactatttgcctgtttgccaaaatgatgctttaaaaaaagctatatcctttattcgtttcaattttcatcaggacattagtattaatgatgtagctgcgcatgccggcattagtgaacgttacctcagaagcttatttttgcaatacttgaatttttctcctttagattatctgaatcaaatacgtattaataaatctattgagctgcttcgaaatacagaattatctgtaaaagaggtcagtttccaatgtggattccagtcaccacaatacttttcacgcatcttcaaacagcgaactgggatatctccacgtgaagtaaccagatagtatttccgttttgtacattatttctttttatatgagccttttcggacacgtcttacaatcttgatttatccattcttttcgttaagtgaactaactttgctcttaccggaacaaagagtataactttataaaaaagaatgaaaaatgaaagaatggaaagatgataagactctgataaccttgataaaagccgaactctacacggcagttatcggagatattatggataagatgggatatctccatcagtttctcccccctcatattcgtccgcttcgtgatgatatgttgatagccggacgggctatgactgttttggaagccgacgtacatgacaattctgcatcggggggaaataatcctctgttacagcgttccttcggcttgatgttggaggcattggatgatttgaaggaagatgaagtgtatatctgctccggttcttctccggaatatgctttgtggggagaattgatgagtgctcgcgctatgcaatgcaaagccgcaggagctgttgtaaatggatactcacgcgataccaaaggtattttagctttagactttccttgtttctcgtatggtccttatgcgcaggatcaggctcctcgtggaaaagttattgattaccgcgttcccattgaggtagacggggttttggtcaatgatggtgatatgctgattggggatattgacggtgtatgtgtggttcctcgtcggatagaagaagaggtttttacccgtgcattggagaaggcacgtggtgaacggatagtattgaagaaaatacaggaaggtatgcgggcacgtgatgcttttgacaagtttggtataatgtagatttaatttgagtttgaagatgaagataactgatgtaaaggtgtggttggtgcaaggcatcaaatacaattggacattattaaagatttatacggatgctggttatacgggagtaggtgaagctaccaactggccgggtagccctgtcgtttatgaagctgttaagcatgttggacagcgtataataggtctagatccgatgagaacggattttatttggaccaaactgtatcgtgacttgaattggataggcccgtatggtgcgagtatgtgtgctattagtggtattgatatggctttgttggatttgaagggtaaggtattgaatgctccctgctatgaattgctgggaggagcatatcgtaaagatattcttctgtatgcaaattattggtttacaaaaggtaaacataatgaggaggactatgctgcccaggcacggatcgtaaaagaggctggttttaccggtttgaagtttgatccgtttgcgcatacaaactatttttatggtgaggatttggcttctaatctgacattgacccctgcacaacaagatttggcattcaatgtatctaaagctgtgcgggaggctgtgggtcctgagatggatattatgatagagacacatgccatgttgaactaccgtattgccgtgaaaatggcggaacgtttggctaagttggatatcacttggtatgaagaaccggcaggtcctgagagttcacaaactttgcgggctatgcgtgagcgtattccctcagatgtgactatttgtgtgggcgaacggcactatacgcgatttggtatccgttcgttacttgagaaacatgtctgtgatattattatgccggacataacccgttgtggtggtccttctgaaatgaagcggatggctaccatggctgaggcttataatgtattgatcgctccacataatcctaatggaccattgtctacattggcttcgtcgcatgtttgtgctgccattcctaattttttcaggcaggaatttatgtttaatgatgtggcttggagagatacagttgttgatcatcccatttcggaaatggtgtatgacgggtatctgcatctgtctgacagacccggtttgggagtagatttggttgaagatgaattggagaaacataccggtatcgtagccgatgctcctgataatttttatatttgataagatatggcatttactattgacttaaaagaaaaagtcgtactggttaccggtgtatcttctggcattggtttaggtgttgcacgcgaatttgctcgtgcgggtgctgatgtggcgggttgttcacgtaaggcggcaaatgatgaaagtatagttacttatgtggaggctgtagaaagtgaggggagtcgggggctttatgtgcaggcagatgttacaaaagagcaggatttggaacagttggttagaaaggtgattgatacatttggcaggctggatattcttgtgtccaatgccgggatgaatgtttttgagggcgcagaacattgtgatgaagagcattggagatataatcttgatttgaatctggcttcacattggcgcttggcaaaactttgcaggccctatttgaaacaaacgaaagagggggttattttgctaatgacttcaaaccatgcgttttgcacaattcctggatgttttccttacaatgtcacgaagacggctataacgggcttagtacacagcttggctatagaatggggacctgagatacggacagtgggtgtagcaccggggtttatcgatacggcaggaaatgacacttggttcaattcttttcctgatgcaaatgccgaacgtcagcgtacggttgatcatcatccggtaaagaaacttggtacggcagaagaggttggtgctttatgtgtctatctggcttccccgatagcttgttttattagtggaaccactgtactgatggatggaggccgttcggcattgatgcaggatttttaataatgaaagaatcaacatgaaagcgaatctactatatcgttgctatgacacgattggagaggctgttacttggcttccggatatgaaaactttgttgtgggttgatattgacagtggcatcctgcatcagtataatctggagagccagaagatggaagaacaccaatttcccgaaatgataactgctgtcattccctggaaagggcatgagcatgaaatcattttggcaatgaagaatcgtctggttgtttatcatcttgtagaaagagagtatcaggtgcttttagaattgacaggtctgcattcacagttgcgcactaatgattgtaaagcgtctccggagggtcgtatttggtgtggagtaatgcatttgatggaacatacccgtaccggaagcttgtactgtattaataatgatttgtcttgggtgtcagttctgactgagcaatatattccaaatggaatggtctggaataaggctggtgaccggatgtattacattgattcaggtcgtggctgtatcgaagaatatggatatagttgttcagctaaaataacctggcgacgtacagttgtacaagttccaccggaatacggagtcccggatggaatgactatcgacgctgacggacttttatgggtagcacattggggaggatttggggtgtatatatgggatcccgatactggaaagttagtagacaaggtagatgtgcctgcccctaatgtcgcttcttgcacttttggcggaatcggggatagcaggttgttcataacgacagctttagacgggctttctgatatggaacgtagagaatatcctttgagtggcagtgttttcgttgtcgatgtacccaaagttgttccaggcgagaatcattacccatttataactgattaattgaaaaattatgcatatctctgttattgatttgattatcttttttgcctactgtttattgattttatttgtaggactctttgtttcccgtagaaacaaaaaagaaacacagagtgcaaaaggatattttttggcgggaagaggactggcttggtgggcaatcggtgcttctattattgcttcgaatatttcggctgaacagtttgtcgggatgtccggttcaggttatgctatcggcttggctatggcaacttatgaatggattgctgcactgggactgttgattgtggcaaagtttttcataccgattttccttgagaagaagatatttacaatgcctcaatttctggaagaacggtttgatagtcgtgtaaagtctgtaatggcgtttttctggctggttgtttttgtatttattaatctgacttccattctttatctgggagcgctgaccattgagaagattatgggagtacccatgattgtgggagtgctgggattagccatatttgcaggagtctattctatttatggcggattgaaagcagtggccttgacagatgtgattcaagtggtatttttaataggtggcggattaataacaacttatattgcactagatactctgggaatgggggaaggagtagtacaaggttttaaaaatctttatgtacagtccgaagataagttccatcttatacttgacaagtctcaccctagttatatggatcttccgggtatctctgttattataggtggtttatgggtcgccaatctctattattgggggtgtaaccaatatattattcaacgtgccctggcggctaaatcagtgagtgaagcccagaagggaatgttgtttgccggttttatcaagttgtttattccattgctggttgtcattccgggcattgcggcttttgctttaaatgctccattggaaaaatcagatgaagcttacccttggttgttgagcaatttactccccgtaggcataaaaggggttgcattcgcagcgctaacagcggctattgttagttctttagcatctatgataaatagtatagctactatttttacaatggatatttatcgttcgtatatccgtccgcaagttggggaggctgatttggtacatgtgggccgctggaccagctttatatctttggtaattgctgttataatagcgcctatgttatccggacttgatcaggcatttcagtatattcaagaatttacgggttttatcagtccgggtgcattagcaattttccttgcaggtttcttttatcgcaaagccacagccaatggagcattagcagctgctttaggaacctttatcttttcccttttactaaaattcctttgtccggggttgccttggatggacaggatggggattgtctttttgctttgctgcggattgattgttatgctgagaaaccaaacacaaattgatgtgtctgcatctccggtacgacggtcacttttccgcactggaaaattatttaatattttgtcttgtatcattattgccattctgatttatttctattgtttgtggtggtaaaaagtagaaaggcattctgggataagtctgatatttatttctttaaatctaataattgttttgtgttatgaaaaattatttattgacgttgattggattgctattcgcaatcggattgtctgcacagacagtgaaagttactggtacagttttggatgaaggtaggcagcctttattgggtgtaagtatttttgtgcaatccaatagagctcatggaactgtaacggaattaaatggtaggtttaccattgatgtagcggtaggagagaagttggttttctcttatatgggatttgtgaataaaactgtgcttataaacaaagctgaacatgatttgcttgtcattatggaagaagataagcaggctttggatgaagtagtggttattggatacggtacggcgaaaaagaaggatataacaggtgctatatcttccgtatcggcagacaaactgaaggaaactccggcagtcagtctgaatcaggctcttcaaggcaaaagtgcaggtgtacaagtgcagttaagtgataattctcccggtggaggtgtcagtgtgcttattcgtggaaaaggttctattaatcagtcaaatgatccgatttatgtagttgatggtatcattatggaaggtactttgaataatatcaatgtcaatgatattgcctctatcgatattctgaaggatgcatctgctgcagctatttatggttcaagagcagccaatggagtagtgattgtgacaacaaaaaagggcgaagaaggaaaggcaagagtgtcattcagtgcccggacctcatttcagtctccctccaacttgcctaaaatgttaacggcacaggaattggctgaaatccgtattgaggggaatgtaaactcacaaatggatgcaaaattcttggcaaatccacaaatgagcatagaagaataccgcagtgagtttaatgccttgaagcaacagtatgccaaggaattacccacatctatgttttcggatgttgaaagacaaactttacttgccggtgaaacgtatgactggtatgatcaaatatcacaaactggtgtggttcaggattatacggtttcattgtctggtggtacaaataaaacgaattattatatcagcgctaattattatgatcagaagggtattattcagggaacaggacataggcgttttagttttcgtgtaaatctggaacagcaaataaagtcttggctaaaagtaggggttaattcaagctattatgatggcgcaactacttatggaggagctaatattggaaatggattaggtgcaaatccgatgtacccgtttgagatagatggtaaagcgcctttggagttaccttactatacgaatcccggacaaagtaatccggtcttatccaaacagatagataatgatgcaaagtccaaccgtttttctatgaatgcatatttaaagatagatattacaaaagatttatttttaaagagtagcgtgtctttggatcaggtgaataatttttccggatatttcgctccttcaaacataaaacaggggcaaagcgtgaaaggtgaagcacaaataaagaataacagatggactgacgttatgcaggaaaattcactgaactattctaagttgttccaagaggtacatagggtgaatgtgatgttgggcaacactgttcaggtaaataattattttggtaatacgcaatatgggaatgggttcgctacgaatgtaatgggatataataatatcagttcggcatctgaatttccggcgggaaagcaatcttccagtaaaaccagatgggccttggcttcttttatcggtcgattgaattatgcttataaggataattatatttttacttttacaggacgttatgatggtaattcccgctatgctgagggacataaatggggctttttcccttcagtagccggtgcttggcgtatttccggagaaaggtttatggaaaaggcgcattggcttgatgatctgaaattgcgttttggttggggacaactgggtaatagtaatgtagcgctttattcatcgtttactaaattatcccccggaatcacagtcgattaccaaggaaattcggtaaataccatccaaaattcagatcagtttatgggtaataaggatttgcgttgggaacgtcaggaacagatcaatgcaggggttgatttagcggcttttaataaccgtttgcgttttactctggatgtgtataagaaaaacagtaaggatttggttttgcaaactcctttaccggtgactaccggttatctgaacatttattctaatgtgggtgaattggaaaacaaaggtatcgaaatttctttgggaggacgaatcattgctaccaaggacttttcctgggatttggatgtaaattgggcaactaacaaaaataaattgaagtccttgtatggaggtatcaaggaaaggatgaacgacgcatctaatccattaaatgccggttggtgggtaggaaagcctctgggtacgatatatacctatcgatatgaaggtatttggcaatgggatgatgatagggttctaatggataaaatgaaagatggtcgcgaaggtggtgatacttattatcctggtgaaaacaaaattgccgatttggacggagatggacagataacaactaatgacagggaaattgttggttatactgatccgaaggggtatggagggatatccactactttgaattataagaattggactttgaatgtaatattcaattatgtgtatggtaatgatgttttcaacaggtcttatcatgaatatacgctgggtgcaggctatggaactctgaacatgttcaatgatgaactgaatcgttggagtgttaataatacaagtggttccataccgagagctcattccaataatctggatagaatgttgatatccagtagagttatgcaggatggttcttacctgcgtatgaagaatgtgacattgaactatcagttccctctgaagtggattaacaaggtgggattgagtaatctgaatctttatgtttcaggagagaatttgttgacatggacagggtttaagggagccgatccggaatccgtaggtacgggttatgatgagacttatccgaacgcacgttctttcactttgggattaaatgttagtttttaaggttgtacaaataaaaatacgaagtatgaaaaagatatatatatatgcattggctggagttttggctttatcttcatgcgatgagtttttaagagaggaaccggaagatttcatgtctgctgaatctgaagacgtagatgaggcattgattgaggcagaaatacagggagcttataagtctactttgtggtttaaaaatggacgtcaggggtttattgggataaccggtacggatgaggccagaggaaaaacggtggaagttaactattgggctgaacaaggagcgatagaccgctacaacacgtcattgaatgctgacaattggttgacgaaatggttgtgggactccggttatttcggtatatcacgttccaatacagcaattaatgctgtacgtaactatacaggcagtacggaggaatggaggcttagtaaagaagctgaggcgcgctttgtccgtgcattcgattattttatgttggtacagaactttggtggtgttcccttgattactgaggaaacggttctttctgccactcctaattatccacggattgataaggctgaaatttataaatatataatccaggacttagaattttgcgaatcacacctaaagacagattatcgtgcaggacgacctacggttggtgcagccaaggctatgctgatgaaagtttatatgtatgcaccggagtctaccggcatacggagttattctgaagcaaaacgcctttttgaggaaatagaaggtttaggcgtatattctttgcaaccgtcttatgccgatttatttaagccggaatttgaaaatggtgtggaatctgtttatgagtttcagtttgaatatccggatgagcaaaatcaatttcaatatttttgtggaagcagagctctcgaccagtttacagagggaggtggatttggtatatttctgccgagtgagaggtacttggggttgtttgatgatacggatgaacggtttgatgccagtgtccggactaagttctatgataagaatggcaatttgctgacctcggcggccgatccggaatatatagctcctcattgcaagaaatatgaagattatgatcgtgtaatggatgccggagccagctcgaaaaatatctattttatccgctatgctgatctaatcctgttatatgcagaatgtcttttggcggagaatgacttggccggtgcaaagcagcaagttatccgtgtccgtaatcgtgcaaaggtttccactccgattacagcctcaaataatacagaaatgctcgacttcatttatgaggaacgcatgcgtgaattggggatggaaggttggagaagaatggacttgatacgtcgtggagcagattattttgctgcgcaagttgataagtataatccgtttgcgaagggaaatgtacagccatatcatgctttttatccaattccaacgaatgaaattaatatgaatgacggaataggggcggaagatcagaatgaaggatataaatgaaaaaagtacaactatgaataaactgttgttaggattgatttttacaatacttttgtgcgcaagctgtaccaatagggggatggttgctatagataatggtattgtaaagctggaatttgatttgaagcagggaacttataaaggaattgatgtggaaacaggacaaacctgtatttacgatgcctcttggcgcgtgaatgattttctttctacggatgcagactccatctattatcagatagaggcaattcaggattcgttgggaaaaggtcaatttatacaggttgtttcagtaaagaaaggacaaccggacttggtttttaattttaatttgtatgatcaggaaccctttgtcataatgtatggtggtatccgtaacggaacctcagaaggtatacagataaaagaaatatcgccggttacaaacgcccgtttgttttacggagcggatatctctaaaaatttcaagcttatagacggtgaaggtggaggttgcccgacttatattcgtgaaactccttctttgttgtcacaaaacaacatgatacttcatttcggaactgacgatgactttcatactttggtgggtggaggtgcttcttatggagagtttgccaagtatgccttaataggagaaaaagaacaaaggaaggctgacttgaaggaacatccggtagaagacctgcagttggtttcttatatcgatgtaggagaagaggctgttggcacggacactgttcagccgtatattacactttcttccggtgctccttataagtttgagggaaacatagcctacaaagaggcaaggactgtagtatgggcggacagggaaataggcgttaagctgcataatctggataaagataaatcctacattgtaggcttgtcgtggtgtgatgatgcggacagacgaaaacagacggtacatctcaaatatggtgataaggagataacttgtattgaagattgccggctaccttctttggcaaaaggagagaatgcccaaatcatttattttgagattccggcagcggccaatgaactggaaccgcaattattggtgaaacaggctggtggtgataatgttgtgatcagtgaagtacttatttatgaagggaaacttccggaagaacgcttgaataagcctgaaacggttgaaattcctgcggctgattttaccaggtgcaccctgaatttatatgcatcagatgttataggtaaacttgtggatgcaaagtcaggatatatgacggagaaggaccggttctacttggattttgtaactgccaatccaatttattctgctgaaaagtatgcgcagactttacggatcttacagcaaataaatttgaattactactattttccgacaatttgtatgtggtatgccatgatgcctatttatggtggaaatattgtcatggggacaaatgatactgttggagccgtagaagaaatgaaacgtgtaaaattgagtggattcttaaaatatactaccatgggtattcgtcttgtacccgattgttatgatgaaaacaatgagaatggttggtgggatgatgagcactggcgtttacgtgggagcggaccgcagggagaaagtatgaagttgaaatcaggtcattaccgtgccccttatgatacttccaggaaatgggcacaagctattttggatttgggcggcttgccatttacctactttcaaacggcggttcgctcgaaagattatgcggaagcttatccggaacatatgctttttaatgaatcttttcatgagattgatacattcgactggctgaataaaaattatacgacttatgattttactgacatcggtttcttggcacacatgcgtgatgtatatcacaatttgaacgacgcaggtatcgtcggtatgatgtttgattatccatatacggggtggccagtttatggcgggatggatgacaaatatagtacagcagccggtgcttatcgtacgatttttaaattggcttcagaagggttgggcaacaaagcatatatccacgaacgtaatttgaagtatggctctgatattgcattggggtatgtggcttcccagcgtacctggggagatacagatgtcattactccggagatggtagctcgaagtggattacgatggtataagaaccgtgttgtggtaaattatgatatggatgcaaagaacctgttgaaggcacaaccggcagattcggaagagggaataaataaattgttgactatgtcttatgtgacggcttcccgtttgctcttggccaatagtttcggtacattggatgctgagcacgtatataagctgtcgcgtatttatcctttccatcagtttgcaaggagtgcccgccctttggatgctttcactactgactatccaagagtttatggcatgaagcttacagatagatggagttcgttgacattcttcaatgaagatgaagaacatcctcaaaagatcagcattaagctttcggggatagaaggacgtggaggagccggtttacatcccgacaagcgatattatatttatgatttctggaatgataaactgattggaattttcggtggtaatgaaaccctggaacaagagttgcgcaaaggggaggcaagacaaatggctgttcgtgaagtggaaagtaatccgcaggttttgtctacagacagacatttgctgcaaggactcctggaattgtccgaagtcttctggaatgaagaaacgaaggaactgaccggctatgctgaactggtggagggtgaatcgatgcatattaccatagcaacgaacggttggcaaccccagcattgcactgtggctgataatgaagtggcatgttctttggaaaacaattctgagaatcttgtaaaacttgttttgaagagtacgcatggaggaaaagtatcttggaaattctcttttaagaaatagttggtagaatttataaagtatctgataaattaaaaatacgaaaaaatgaaatatactgcaattatatggggagtattgttgttcctatgttctgcttgtgaacagaaaacagaagtaacttcgcccgatggcaggaacaaactgatgttgatgttggatgaatccggttcattatattatcagattttttccggtgggaatgaaattgttcgcagctcgctgatgggggtggttgcggagaatggtaaatattgttttgacagtggattggtgtatgtggatcaaacgggacggactatcaatgaaacatatactttgcccacggggaaacgctctgaatatgtgaataagtcaaatgaaagaacgttcgtctataaaaacgccgccgggcagttattgaaggttgtttgccgtgcttatgatgacggggttgcattccgttacgaactgggcaatcaggagccggtaaccattcggcatgaactgacagagtgtactttgtcggatgaaacccatacttggatgatggactggattaaggattatgagaatttctacccggaacgtgtacttgatactattacgagacctacagagtttctgtttcccgtccttacattacaggataagcagtggatgttgatgacggaagctgaagtgtatttcatgccagccatgcacttgtcaaaggagccaaaatctgctacatttcattatgtgtatgcacctgaagattcggcatttgtggctgaaccttcttttaagacttcatggaagacttttattatgggccaaaatataggtgatattgtagaatcctcattggttgagaatctgaatccttctacagatttctctgatatggattggataaagccgggagttgcggctttcccttggtgggggaattatttggcaaacagttatatcgatactctaaaaatgtatgttgacctggcagccgagatgaagtgggagtggttggaatttgatgtttcactaatcaatactccgttccattcttcaaaggaatgggaggatgtgacctggataccggaattgactgcttatgcaaaggagaaaaacattcttgtatatgggtgggatgagataaaggtgttggacaatgaggcgggacgtgattttgttttcgaccggtataaagaaatgggcttggatggaataaagattgattatatcgattctgattcaaaatatgcaatgatgttccgcgatacagcttgtgctgaagctgctaaacgtaaaatgatggtgagttttcatggagagactttgccgcggggacatcgcagacgttaccctaatatcatgactaatgaaggagtgcgaggagctgaatattataccttcaagggggcccaatcacctgatagccgccataattgtactttaccttttacacgtaatgtggttggatctatggactacactcccgtgacctttactatccgtgatgagaatccgcgtacaacaacgtatgctcatgagttggctttggcatttgcctttgaatccggatggatttgtatggcagacaggccggccgcctatttgaattctccagctcgtcctttgcttgaaaagattgaggcagcttgggaccagattcatttcatagacggttttccgggcgaatatttctgtgtggctcgatgcaaagcggggaaatggtttgttgcgggaattaacggcggacaaaaacgtagaattaaggttcccttgtcttttctggataaaggtcaacataccataaccttatatgctgacaaggaagggaatgaattgcatgatgtacgcattgaaactttcccggagataagtgagaaagaggtgttggaaatagatgtgttgcctcatggaggctttgtactggatattgattaaaaaaacaaccacatgattttgagaaatttattcgtaactttccttgcatttgttgcgtgggggattcaaacaaatgctggtgaaataccacgaaaggaatatccacgtccccagtttgagcgtaagacatggctaaacttaaatggagaatgggactatgcctttgattttacaaatattgggatggaaaaggaattccataaagctacaactttcagcggtaaaataacagttccttttccgccggaaagtaagttgtccggggtagaacataaagattttatcaatcatatttggtatcatcgtatcatacggagaccggaagaatgggcaggcaagaatgtaatactgaactttggggctgtctattttaattcggaaatctatattgatggaaaattggttggaagacatttcggaggtagctcttcttttggtttcgatattaccggatatgtaggggatgggttagaacaccatctggtggtgcgtgcaagcagtgatctaagatctatgatgcaaagtgccggtaagcagagtcttttgctgaactctcatggatgccaatatacgcgtactaccggtatttggcaaactgtatggctggaggctgtggcatcggcagggttacagtctgttcatgcgctaacggatattgaccaaaaacagttggttattcacccccgtttttatcgtgacagttataagaatacattgcggattgttttgcaagagaataacaagaaaatcggaacagtatgtgtcaaagctgcaaatagttctgtggctgtattttcattgaagaatgtcaggttatggttaccggaatcgccttttctgtatgatgtcctgtatcaagtgttggatgagaatggaaaggtgatagatgaggtgacttcttatgtgggaatgcggaaggtccatattgagggaaataagatttatcttaataataagccttattatcagcgtttggtacttgatcagggattttatccggacggtatctggacagcgccttcggatgaggccctgaaaagagatatagaaatctcgatggctgccggttttaacggtgcccgtctacatcagaaggcttttgaagaacgtttctattattggaccgacaaactgggatatatcacttggggggaagcaccaagctggggaatggatgcaaacagcattgaggttgcacgtaactttctgcaagaatggtcggagcttgttttgcgcgaccggaaccacccgtctttattgatttggacgccgatgaatgaagagtggtggcccgatcacgtacaatatccacgtttcacagcagatttgtatgatttgactaagtcattggatcccactcgtccggtgaatgatgccagcgggggatgtcatataaaaacagatatatggacggtacatagctatgaacaagatccggctgctttgaaggatgccttatataaagatggagctttctttcagacacctaataatccgcaaggagtgccatccgccaatgtgggatttaatgggcttggtgtagatagtccctatccttttccgaaatatgagggcgatatgccctatttgatagatgaagtaggtggtataaaatgggtagagacgaaagataaaagtaatacagatagttcctggggctacagtacacctcctgcaactcaagaagaattcctgcaacgtcttgaatcgcagatagatgctatactaagtttaaaggaatatgtttggggatattgttatacacaattgaccgatgtagagcaggagcagaacggcattttcttttatgatcgcaggtccaagtttgatttgaaacttattttccgtatcttttctaaaactccccgggaataaattttgcattttattcttatcagttataaggcaaaaagataaaagtggcagctgagcattttattgtggaataataagaaagatgggaagaaggtcgtatgaaaatcccgctttgctttattgtttttcttcttttgcctgtagtaaaacttcgtcccacggttgcgggctctatggtttccaattggaggctgtgtagcccgcaattgtgggatatacagtccacaactggaaaacgaggttttgctacaggcataatgacattagtattaaagctttaggggaaaaaggaaggagcatatcaagttttacatctacagttcagcttcctatataatgagagtatagggtttagctcctaacaaaattatacgtttttaactccagtaatgaatagttcaggctaaaaagagatatctgcatgaattcaaacaaagtttgtgtaatgcatcttaagagtctgttaattagggaaatatgagtttgaaaggatgaaacaactggtgtaggatgaagctttcatacatcttcctacaccactttctacaccatttatctatttgataatcaaatgaaaataatggcgggtgtaggatgtaggagatattgatataaactcaacagtatgtaatttcatttctataatatatttcaggttttcatttatgtatatctcctgaaaaatatttttaatagaggggatagggaaaacacttctaaatggagtagctttatttaatttttgtattatttttgtatcgatgtacaaaatcattgctaatactattatgaaaactctttttgctttttttctactacttgtcacctgtaattctgttatgggaactattccggcaataccagcggatgtttataatcaccaactttactatactgctcctgctaccatttgggaagaaacacttcctttgggtaacggtcgtctcggtatgatgcctgacggtggcgttgatcgtgagcatattgtgctgaatgaaatctccctgtggagtggtatggaagctgattatggtaatccggacgcttcccgaagtctcccggctattcagcaacttttatttgaaggaaagaataaagaagctcaagaactgatgtatagcagttttgtgcctaagaagcctgaatccggtggaacttatggtaactatcagatgctggctgaccttaatatcgacttcagttttccgcatagaagaaaaactacttcagaaaatgatgcagctccggttactgattaccgccgttggctcgatctgcgtgatgcagttgcttatacctcattcacgaaagaaggtattgactatcaacgtgaatatttcacttcacgcgataaggacgttatgatcatacacctgactgccagtcgtcgccgtgccctgtccttctctgctcaactttcccgtcccaaacaaggtgcggtctctatgcttccgggcattgggaaggaagaaggaactttgttgttggaaggtactttagacagtggaaagcccggacgagaaggtatgaagtatcgtgttgccatgcgattaatatctaaaggtggtaaacagaatatttctgccgagcgtggtatcaccctgactcaggggagggaagcatggctggtgctttctgccactacttcttatgctgcttccggtactgatttttcaggaaaccgttataaagaagtttgtgatagtttgctgaatgctgctacatcctccaactctcaactctccactctcaactcttcacttcttcaccgtgccctttatgatcgtgtatctctaactcttccgtttacggaagatgatgtattacccactaacgagcgcattactcgtttcacggagcgtgagtctccagctttggctgctctctattacaattatggtcgttatctatttatcagcagcacccgtccgggtagcttgcctcctaatctgcaaggattgtgggcaaatggagtagaaacgccttggaatggcgattatcataccaatattaatatccagatgaatcactggccgcttgaacaagccggtctttcggaactttaccagcctttgactgcgcttatagaacgtcttatcccctcgggagaagagactgcccgtactttttacggtactcatgctcaaggttgggtgcttcacatgatgacgaatatctggaactataccgctcccggtgaacatccctcctggggggctaccaataccggtggtgcctggctttgtgctcatctttgggagcattatcaatatactcaggatattgagtttctgaaacgaatttatcctgtgctgaaaggtgcttctgagttcttttactctacaatggtgcgggaacctaaacatggttggcttgtaacagcccctacttcttctcctgaaaatgcttttttggtcggcaatgatccgactcccgtcagtgtatgcatggggcctacgatggatgttcaattactgactgagctatataccaatgtaattgaagcaacttccatactggaatgtgatgctgactatgccgcgaagttgcgggaggcattagataagttcccacctatgcagatcagtaaaggaggatatctgcaagaatggttggaagattataaagagcaagatgtacaccaccgccatgtctcccatctgtatggtttgcatccgagtaatctgatttctcctgatgctactcctgaacttgccaatgcctgtcgtgagacgctaaatcgtcggggtgatggaggaaccggttggagtcgtgcctggaaggtaaatttctgggctcgcctcggtgatggggatcgtgcctggacactgttcaagagccttctttatccggctgttgatcctcagacaaagcgttatggcagcggaacgtttcctaatttgttctgttcgcatccccctttccagattgatgggaattatgggggaactgcaggagttggcgagatgttgttgcaaagtcatgagggttttattcatctgcttcctgctttgccgaaaagctggcatactggtaactttcatggaatgaaggcccgtggcgggatctccgttgatttggagtggaaagatggaaaggctgtgaaggctatacttacggcaactataccgggaatatttcatgtgaaaatgccggaaggtgtcattcgggcaaaggcgattatagacgggcaaagtaataactacacaggtaaaacgatttctttgtcattgcctgaaaagggggaatgtgtgttatcgtttgagtaaattatctcttaaagatttgcctgccctatgtgaataccttacttttgcacgcggttaaacctaattgcttgctgcaacatgaatatgaagaacagaattactttatttctccttgtgctctgcctgttgatacctgcaacgaccagtgcacagattcgcgaactggaacgttcgatacccgaagtggaaggggttccttccggagcacttattgctttgatggactctctgatgggcttgcctaaaacggacatacatagtgtgatggtactacgtcatggaaaggtaatcgcggagatttatcctgaacctttcgctccggaatatcggcataccgtatattcttgctccaagaccttcgttggtgccgctgtaggccttgctatttctgaaaatcgtttgcggctgacagatcgggtggcttcttttttccccgaccaacttccggatactatttctgcaaatcttgccgatatgaccgtccgcaacctgctgaatatgacttccggcgtcactcctgactggaatatgcgtaatggtcgtacagactggatcagagggtatctgggaaaaacgataaaagttcccggcaaacatttcgattatgactccatgagctcgtatattctttccgctattgtgcagaaagtgacgggaatgaaagtattggattacctgcggctgaaactgttcaaaccgatgcatatcaccgatatatcctgggaagtaagccctgaaggaatcaataccggaggttggggtgtgtatttgcagagtgaatcgttggctaagttcggacagctgttactgaatcgtggagtatgggaaggcaagcagttgcttccggcagagtgggtggacaggatgatgactaaacagtcggatactggtagttttggctacggttatggatatcagatgtggctttgtgaatatccgggtgctgtccgcatagacggtgccctgggacaatatgcgcttctcataccggacaaagatatggtagtggtcatcactgaatgtactttgatagatggagctacacagcgccgtttggtgtggaatcgcctgttgcctgctgtcggcgatgataccttgataccgggaaaggattataaacgcttgttgaaaaaacaatcttcttatcagttgccttttgtaccgggaaaagcgagttcatctcttgcccgtgattatgcaggaaaaagtatagttctcgaaccgaacaagttcgactggcaatctctggatctccagttcaagcagaaggaagtaatcatgaccgtaacagagactgacggtacaaaatataatctctcattcggttataagcaatggaaaaaaacttcaaccgatgtccatcctccctattcgatagaagcgaaaggacgttttaatggaatagaggggccgttttatgtagcgggcagttatgcctggccatcggctgcgatgttggaactcaaagcacattatgttaactggattacagctctcaatattactttccgctttgacggggagaatgtgcaattgacggttaaggagaactactcgtcggaaccgaaagttatcaaaggaaaggtatgcgactaagcggagtgttacttatctttgtgcccaataaaagaatttatatgttatgaaccgtatcacactgaccctgaaacgcccttttatctggttgagccgttttcgccatcgttgcggctatggggtacattcgccttttgctttcaatctgattacgcaggtgatttacgaatctactccttattataaatataaagatctggcagtagagcagaaaaaactggccccacagaaagacaactattggaagtatgaatcgaagaaagtgaaacgcctcttgttccggttggtaaattacatccagccggatacgatagtggatgtcggcaggcttgccgcttcgtctctctatctgaaagcaggaaaggagggagcggactatacagcggcatccgaactttccgaattatttctggaagccggcgtacccgtaggtttcctttatctgcatgattatcgtcacccggaatttatggaagaagtattccgtatctgtgtagcacgtacctgtggaaagtcggttttcgtcatcgaaggaatccgctatacttcgcaaatgaaagcgctttggaaacgtatgcaacaagatgagcatgtgggtattacgttcgacctttatgaccttggaattctcttcttcgataaaactaagataaaacagaactatattgtcaacttttgattatctttaggcgtttcaatagtgattaacagttagtgattggtgattagcgtcacttactaactgctaaacactaattactaaacaccaatcacttatgaagatatataccaaaaccggtgataaaggtactacctcattagtaggtggtacacgggtaccgaaaacccatgtccgtctggaagcatacggtacagtggacgagttgaatgctaatttgggagtgcttgtcacttacctgccggatgaagcggatcaggtacttgtccgtcatattcaggaccgtcttttcgcagtaggttccaatttggctaccgatcttgaaaagacagaattgaagtgtgccagtgttattcaccccgaagaaatagaacgaattgaacgggagatagatcgtttggataatctgctgcctccattgcatgcgtttatattgcccggcggtagtcgtggagcatctgtttgtcatgtttgccgcacggtttgccgcagggcggaacgtcgtattctggccttggctgaacaatgcgaagttgctcccgaattgcttgcttatgtgaaccgtttgtccgattatttgtttgtcttgtcacggaaaatcaactgggatgagaaaaaagatgaaatattttgggataatagttgtaagtgagagattttattatacttttgccgaaaaatagaaagtaggacttaatattcacaattttaatacttaggacttatgtattggacattggaattagcatctaaactggaagatgctccctggccggcaaccaaggacgaattaatagattatgccattcgttcgggcgctccgctcgaagtgattgaaaatttgcaggaaatggaagatgaaggcgatatttatgaaagtattgaagatatatggcccgattatcccagcaaagaggatttcttctttaacgaagaggagtattagcatgctttttgaaccttgctccggttggagaaatacaaggtagttaacacatagaaagaggtagtccgttagatctgtttataacaggttaggaggactgcctcttttttatattattccatttatgactgaaacacgagaaaaaacggtatgccgcctgccggaactaaaagaacggcacttacccggagattgccgggaagcggtatacacgcttttaaaagagacttacggttacgaacaatttcgtgatctggaagtgtacgacgatttgttcaaggggaaggacacgcttcaaatttcacagggacaattgatagaaagtgttattgtcgaagcagagaaagcccggaatggaggagaagatgtggataacatcttgcttacagcacctaccggtgcgggaaaatccttgttgttccagttgcctgccatctatctgggtaatgaatacgggatgcttaccattgtcgtatctcccttgaaagcattgattgtagaccaggtggaaggcttgcaggaattggggtacatgcgtgtggcgtatgcctcttccgatttgtcgcccgaacagaagaacgaagtgtacaggcaggtgcgtgaaagtgaggtggatctattctatctttcaccggagttgttgctctcgtatgatatcaagcactttgctggtgaacggcgtatcggtctggtcgtagtggacgaagcccatacggtaactacatggggcaaggaatttcgtgtggattattggtttctggggcgctatctgcaaggtttgaagaaaagccttggatatgcattcccactttttgcactgacggctacggctgtatggaatccgaaaggagggaatgacatggtgttcgaaaccattcgttcattgcaaatggagccatgtgtgctttatgcaggtacagtgaaacgccggaacatcggctttgatatccggcagatggagatagaggaaggagaaacctatgataaagccaaacagcgtgttgtggctgaccgtgtagaggatttcctcgacgggcataagactattctttattatccttttgcaggtggtatcgacatgcgtctgaaaacgtgggtgaaatcgacggattggcacttggtcgcctcctactatggtaagaaggacaaagaacaaaaagcagctattgtacaggagttcaaagaaggcgagaagcgaatgattgtggctacaaaggcattcggcatgggggtggatatcagtgatatcgaccgggtgtatcatgtggcgccttccagcacatttgtggactatatacaggagatcggacgtgcagcccgtgatacggatattcatggaatttcggcgacggattatcatgaaagggatttctattatatgaagcgcctgcacatggcgggcaatatagcacaggaacagttgtcgctgattttgaagaagctgatggaagtgtaccggatgaaaggcgaaaaacaggaaatgctggtgtctttgtccgactttgagtttgtggtgaaattgccaagaatgaagaacaagctggaatatgaagcggaacttggacaattgattaagactgctctgctatggttggaagatgatttgagccatcgttatggaaagaaattgctggaagtgagtccgcaaaacctgctgacggaaggatatattcaggataagactggtgatgtttttattcatgagttcaaggattatcttacgaaggtgaagggcacggaagatgtgtatacggcacgtttggagaaactgtgggaagaacgtttcgcagagttgggatatagagaatttaaacagaaattgaatggtggtacgttgtgggaaggttcccgtgcagtgtctgtgggtaagcatgaagtattgctgaaagaagatgcagccgtaattcgccaacgaatggatggactgttctatagtttgaagactttgcttgttgataagttgcggaagactaaggggcgttttgatgaagaagaattgcgtgcgatatttgccgagcatggtatggatgtgccgtcagcgaaacgtttcattggttcactgctggagtcacgtacggaagaagggcgtagtgtgagctatatcagtagtgtgaagaagaaagactccaatgaactttctttcacggtgacgaaaggatttgacttgttgctgtcgcgctatcagaaactctttagccagcgcattgtgggtaaaaaaggtgaccggttattgttctatggcactccgttctctgatttgaatatgctgcttaatctcctttccatgctcgattgtctttcattcagtgtagaaggtggcggtacgccttgtgtgcaggtgtgtttcgatgaccctgagagcttacagcagatcgcgtcctccgatgaatatcataatctgatacttgagaataatgagcagatatttcaggagcagatcgaactgttctctttcttcttcggaacggatggaatggatgatacgaaacgctgggattttattgaagactactttaccggaatgggggtagaggagctgaaggcgaagtatgctgctccactataaaaccaattctttgaataatctttctaacgtcctgtccagatcgtcggagaaaccggcgtgcggacgggacgtttgaatacaggaacttctcacggcagtcagccagcggaaacgttccggtacatcaagttgggcgatggggccgccgtctttggctcccgaacatattttattaaatacatccaaatgggcaaataccaattcccggtctacttcggaaacatatagtttcagtttgtcctcgtttatctgacaaacggacttgatgtaacctgcccttttcgagaaaaggattactcccacattgaagaactcctcacgttctactttgggaaccaggcgaataactgcgtattcatataagtgctttccttgcattctgtgcttcttttgtaaatatttcggaatgggtcagtctttcggtcagaaagcgggtatagatatctctgatttcttcgggcgtttcatgggtatcttcccagtgcagccagtcgtcaggaataagtgcgacgatctgctgtatcttttcatcggtcagcatgggacgaaggagggtatcggcttcttcaagtcgggatgcttcgggtagcagcacgtgatttttgatataggtgaacggacttaccgcatgtttctcccagttttcccatgaatggtgaaagtaaagagaagcaccgtggtctatcagccaaagttccttgtgccacatcaacatgttggtgttgcgaaaagtacggtctatattggtcaggtaggcatccagccagacaatacgtgaggctagttccggatctaccttggtcgctacaggatcgaatgtcagggcacccgaaaggaagtgtaaacccaggttcagtccgcggctaccttgcaataagtcttgtatctcttcgtctccttcggtccgtccgaatgcttcatcgaggttcaggaacaccagctccggcactctgaatccaagtatatgcgcaacctctccaccaattagttcggatattaatgcctttgttccatggccggcaccacgaaactttacgacgtatttgaattcgtcatcagcttccgccagtgctggcagtgaaccgccttcgcgcaaaggagtgatgtaacgggtcagattgactgttcgcaactctatcatgattgtcctttcagaaaatagttaggccgtccggctcttttgaggggatgactgttgcaaagatagtgaatattcacgattgcccaaggctggcttccagaaactgttgcagaatgcgggcatgattacggacaggttctttggaggcatatagcaaagtaaccgttttataaggtttgattgatgccagaaagttccgtgtggcttcagatgtttccagctctttccgatacatatctgagaaagcctcccaatgtcctgccatatcttcatgaaaccatttcctgagttcgggggaaggcgtgatgtctttttcccagtcatcatatttcagatattcttttttcatgccgcgaggccatagacgatctaccaatacgcggtaaccgtcttctgcttcgggggcttcatagacccgtttgatttttatctgcgtcatagctttcttttttatatatacaaataattggtagaattagttcattacttttcggttatgaattaattcaccacagattacacagattgacacagattctattttactgattattagattaataaatctgtgtgaatctgtgtaatctgtggtgagttttattcattcctataccgttatgaggtcaagtgataagtaatctctttttccttgaaacgaattatctgtttgtggtaaatacatggcctgtttccagagtctttctctttttgattctgttttacacaattttttctcgttttatcagttcttatattgatgaaatatagccgtatcttgaaatatataatttttatctgtcttttcttttgtgcggcaaaaggtcaggcgcaatttgatgcacgcttcagtcaatactgggaggtgaagggatattatcatcccggctgggtggggcagacagataataaaatgaatatttatggttcgtatggcatgcagttgatgggttttacacatgctccgcgcgtgatgtactttggggctgatatgccttttactctgttcaataaacagcatggtgtgggtgttggctttttcaatgaggggatcggcttgttccgtaatcaacgtttttggggacaatatgcctatcagatgaaaatccggaaaggcaagttgggtatcggacttcaagtggggatgctgaccgtatcgtttgatccgtctgatatcaatcttggagatgaaacggatgatgaagcttttccgactgctgcggagagtggaatggccgttgatctcggattgggtgggtactattcgcaccctaagttttatgcaggattttctgcccatcatctgacggctccccgtgtctctctgggagacaaaagccaaataaaaatacatcctatcttttatttgacaggtggatacaatattcagacgcgtaatccgttaatttccatacaaccttctatgcagttgcaaagtgattttacttctacaaggctggatgtaacggggcgattgttttatacctatcattcccgggtgcttagtggaggattgacttattcgccggatacctcggtgacattcagtttcggattgacggtgcggggcgtgacgttaggatatgcttatgagtgttttacttcgaagataggtgtcgcaagtggtagccacgatctggtagtgaggtatgcattggacttgaatgtatttaagaaaaaccggaacttgcataagagtgtacggattttgtaagagaatatacgaacaatgggaaagaataaaggaatgaaaacaattcatgcgtggtacggggtggctttattgctgttcggttcgctggtttcgtgtatggggacggtgggaaacagttccatgagaggtggcgaagtgataggagccagtgctgtggcatggaatgagcctgcgccttacggtatggtgctggtgaaacgtggttcggtgaaaatgggccccgacaagcaagatagcttgtggggaacaatcgttccttcacgggaaatttcagtcgagtctttctggatggatgatacggaagtgacggttgccgaatataaacagtttgtcaattgggtgcgcgattctattatccgtgaacgtctggcagatcctgcttatggcggtaatgaattatataagatagaagaagaccgggaaggaaatcctatcaaaccttatttgaactggtcgaaacccattccctggaagcgggcgacagaggatgaacagatggctatcgaaagcgtatataagcatcatcctatcgacggtacgctgatgctggatgccggtcagatgaattattattatgagatttatgactatactgaggctgccaagcgtcataatcgcctgaatcccgctgaacgtgttaagaataccgatatacaggtgaacccggaagaggtgattatgataacgaaggatacggcatacattgatgatgaagggcggattgtgaaccgtactattacacgtccgttatccagcgaatgggattttctaaacagctatatagtaaatgtttatcccgatacaacctgttgggtgaatgactttccgaatgcgaataatgaacaatatatgcgtttgtatttcaaccatcccagttacaacgagcatccggtggtgggtgtcagctgggaacaggcgaatgcgttttgtgcatggcgtaccaattatttacttgcaggtctgcgtggacaggctaaatatatccagcgctatcgcctgccgaccgaggccgaatgggaatttgccgcacgcggaagggaggataataaatatccctggaaagagagtgaggaaaccaaagatgaccgtggatgctacaatgcgaactataagccgggtaaaggaaattacaccaaagacggcaatctgatttcaacccgtgtaggagcttatacacccaattcgaatggattgtatgacatggcaggtaatgtggcggagtggacttcaacggcttatactgagtcgggagttctgcaagcaagtgacatcaatccggatattcagtataatgctgcgccggatgatccgtatgcgatgaagaagaaagtggtgcgtggtggttcatggaaagatgtaaacgcgtttattcgttcggatgcccgtacggcggagtatcagaatgagcaacgttcgtatgtggggttccgttgcgtacgtacacaagtgggatataataagaaggggaaatgataagatggtaaaatggtaagatgatggaaaaagatactgtaaataaaaagagggattttggacagaagttgcaggactttatggcaagttaccgtggcaaggtcattatgaactatgcttatagctggggtgctgctatcgtcattgccggtacattgttcaaactgacgcacttgcctggtgccaacttgatgttgtggattggtatgggaacagaagtgctggtgttttttatttctgcatttgatttgccgagaaggcagacggagacggctacatccggcggtatcgttgtggtgggagatggcacaatcggcagtgccggtggatggacaaatgatttgccgaagacacaatccgtcccttcaaatcagccggtatcagtgactgtaggagcgaatcaatattcacccggaactccggcccctgcttttactcctgaaatggaagaaactacgcaggcttacatagcccaactgaaagaaatgacagaaatgctttcgcgctttacagcacaggccgaatctctttcacatgatgctgagcagatgagcgctttaaaccgtaatctggcaggtatcaacgccatctatgaaatgcagcttcgtagtgccagcactcagattaatacaatcgatcaggtgcatgaacaaactcgcaagatggcgcgtcagatagaagaactgaatgctgtctatgcccgtatgctacaagccgtgcaggttaagtgataaagtggtgaagcgatagaacgagagttaaagctatcgtgcagccaaattgtaaattgtaaattgtaaataaccccatgtctctgaacaccaacccggattctccgcgtcagaagatgataaacctgatgtatatcgtcctgatggcgatgctggcactcaacgtttcgtcggatgtgctgaatggtttttcattggtagatgaaagtctttcccgtacaacggcaaactctaccgtgcagaatcaatcactatatgacgggcttgccggtgccaacgaacgtaatcctgagaaaataggaccgtggtttgagaaagcggtacgtgtgaagaatatgtccgattcgctctataactatgtggatgaattgaaactacgcattgtgaaggaagcggatggcaagaatggggatgttgccaatatctccaataaagaagatttggaagctgcttcttttgtgatgcttgcacctggtagcggacagggcaaagcgctgttcaaccgcatcaatcaataccgggaaaatattctgactcttgttaccgatccgatacaacagaaaatcatccgtgataatctaggtactgaagtaccgcgtaaggcgtcagctgcaggaaaaaactggcaggaatatatctttgaaaatactccggtggccgcagctatcacgctgttaaccaagctgcaaagtgatgtacgctatgctgaaggtgaagtattgcatttgttgacgcagaataccgatgtgcaggatgtacgtgtaaatcaacttcaggcttatgtcattcctacctctcagaatgtggtgcgcggtggtacgtacagtgcccgcgtcattctggctgctgtggactctactcagcgcccttctatttacatagccggtgaaaagcaaccggataatgccgaaggatggttcgaaactgtttgtaaccgtacaggggagttctctttggatggttatctggagttggcgcaagggaatggcgaagtgcttcgcagagagttctcacagaaatatacggtggttgagcctactgctacggtttcagctacaatgatgaatgtactctatgccggatatgataatccgatcagtatttccgttcccggagtgccggggggacaagtacaggcaagtattgtgaatggaaacggaaccctgaatcgtgccggaaacgggtatattgctcatcctacgactatcggtaaagatgtagtgattcgtgtgacggcatccgttggcggacgtacgcagtcgatgggggattatacttatcgtgtgcgccagttgcctgatccttcaccgtttatagaatatacggaagacgggacacctaaacgatatcggggaggccgtggattatctaaagcaattttgatgaatactcccggcattgtagctgctattgatgatggtttgttgaatatcaacttccgggtgctgggatttgaaactgttttctttgataatatgggaaatgccgtgccggaagtgtcttcgggggcttcattctctacacgtcagaaagatatgttccgccgtttatccagaggtaaacgtttctatatttcccgggttcgtgcggtggggccggatggggtggagcgtttgctgcctactacactggaagtgattgtgaattaaaattagaaatcgaatataataaggtataagactatgaaactttccttgaaactcatgatagctgtcacactctgtgcactgaatctttcagtggggtgggcgcaaaggcaatatccgggttcgccaggcttgccggaggatgtggtatggatgcgcgaaatctatcgtacgctggatttgacaaaggataccaatggtacattatactatccggtggaaccgcagggaaataagatgaatcttttcgctaccgtgttccgtttgctggcgcaaaagaaaattccggcttatgaatatcagctggatggtacggagcgctttcagaaagatgctgaggtgactttccgtgatgtgctggatcgctttcaaatttattatgaactgaagaaagtggcaaatcgccgtgacagtgttttgtctatcagtaatagtgatataccttcagcggatgtattgagttactttgtgaaggaggtatggtattttgatcagcgtacttctacttatggctcagtgataacggctatctgtccggtgttgcatcgttcggaagaattcagttcggagaaagtgaagttacctatgttttgggtgaactataaagatttggttccctatctgactcagacaaaagtctccgttagcaattataataatgcggcaaacagtacttgggatgacttctttacggcacgtttgtataaaggagatatttataaaacaaccaatctgcaaaatcgtactttgtcacaatactgtccgacggatagtgccatggtgaaagagcagaagcggattgagaaggaactggtggattttgaaaagacattgtatggcagggaccttatagaagaaacggattcggtttccacagcttcgggaataaaaacagcgaagactaattcgaagaaaagggggcgtgacaatgctgttacaaccaaaagtaaatcttcttcctcatcaaagtcaaaatcttcggcaggtaagtcccaatcggtatctaagcgggaagcagcagccccgaaggcgtcagtacgacgacaacgccgttgaacaaaaatgaatctttattgttctttttaagaataaatccatatatttgtcccgataatttaaacaaaaaagaattatgaagaagatttttagtgctttcattatagctgtaggctgtatgtttatggctatgcctgctcaggcccaactcattaaatggggtgtaaagggtggtgtcaacttgacaaagatagactgggatggcggatataaaggtaacaaggacaactctgccggtttctttattggtccgatggctgaaattacgattcctattgtaggcctaggtgttgatggtgctttgttattctcgcagagaggtaagggtgacgtaaaacaaatcggagcggaagttcccatcaatctgaaatatacgattggcttgggtagtttgctgggtgtttattttgctgccggtcctgattttttctttgattttgataagaaagacaacgttgatcgaaagaaaactcaggtaggacttaatctgggagtcggtgtgaagctgatcaaacacttgcaagtgggtgtaaactatcagttcccgatgggtgacagctttaaatggaaagaggtaggtcatgccatcggtgcaaagaataagacttggcaaatatctgccgcttatcttttctaagaaaatagaatctattgcgatataatagcgttgctgattttgattggcaacgctatttttttattgtatctttgtcgctgcaatgaaaaaatttgtggatgtcatattgcctttgcctctgccccgctattttacctattctttgcctgaggaatgggcggatgaggtgcaaatggggtgtcgggtagtagttccattcgggcgtaagaagtactatacagcgattgttcgtaatgtacattattgtgagccggcggattatgaggtaaaagaagtatctgcattattggatgcccatccgattttattgccggaacaatttaagttctgggagtggctggcagattattatctctgtacacaaggcgatgtttataaggctgctctgccttctggcctgaagctggagagcgagacgatggtagagtataatccggattttgaatcggaagttcgtttgccggagcgtgagcagaagatattggatttgctctctgcggagcccgaacagtgtgtgacaaaactggaaaaagacagcggcctcaagaatatactttccgtaattaaatccttgctggataaggaggccatctttgtaaaagaagaacttcgccggacttataagccaaagaccgaaacgcgcgtgcgactggcgaatgaagtacggaatgaaaaacggctgcaagaactttttgatgaattggcgcgtgctccgaagcaactggatttactgatgaaatatatcgaactatccggtattttgggaggtgacgggctgaaaagttttcctaaagaggttaataagaaagaactattgctgcgggcatccgcttcgccggctgtgttcaatggcttggtagataaacatatctttgaagtttaccaacaggaagtgggacggctgaattccgtttttcgggaaattcttcccattaatcctttgaatgaacatcaaaaaatggcacacgatgaggttgtacgaagcttccaatccaagaatgtgtgtctgctccatggggtaactgccagcgggaaaactgaaatctatattcatttgatagaagaaactatccggcagggaaaacaagtgttgtacctgctacctgaaatagctcttaccactcagattaccgaacgtctgcaacgggtgttcggagatcgtttaggaatttatcattctaaatttccggatgccgagcgtgtagaaatctggcagaagcagctgacggaaaagggatatgatattatccttggagttcgttcttctgtttttctgccttttcgtaacctcgggttggtgattgtggatgaagaacatgagaatacctataaacaacaggatccggctccccgttatcatgcccggaatgcggcaattatattggcagccatgtatggtgccaagaccttgctgggcacagctaccccttctattgaaacctggcataatgcttcttccgggaagtatggactggtggagctgaaagagcggtataaagaaattcaattaccggaaattatccccgtggatatccatgagttgcatcgcaagaagcgtatgaacggaccattctcgccgttgttgcttcaatatattcatgaggctttggatcaaaaacaacaagtcatcttgtttcagaaccggcgtggctttgctccgatgattgagtgtaatacatgcgggtgggtgccgaagtgtaaaaactgtgatgtgagcctgacatttcacaaaggattgaatcagctgacttgccattactgcggttatacctatcaactgccccataagtgcccggcttgcgagggtactgacttgcgtaatcgtgggtttggtacagagaagatagaggatgatatcaagattttatttcccgaagccgctgttgcccgtatggatttggataccactcgtacccgctctgcttatgaacgtatcattgcagattttgagcaggggaaaacggatatattgataggtacacagatggtttccaagggattggactttgatcatgtcagtgtggtaggtatcctgaacgcagatacaatgttgaattatcctgatttccgttcgtatgagcgtgcttttcagttgatggcacaagtggcaggacgtgccggacggaagaataaacgcggacgtgtaattttgcagacaaaaagtatcgatcaccctattatagctcaggtcatccataacgattttgaccagatggtggcgggacagcttgctgaacgtcagatgttccactacccgccttactatcgtctggtgtatgtctatctgaaaaaccgcaatgaacaattgcttgacctgatggcacaaaccatgtcaggcaagttgcgtgcagttttcggtaatcgtgtattgggaccggataaaccgcctgttgcccggatacaaacattatttatccgaaagattattgtcaagatagagtataatgctccgatggctcgcgcccgtgaactgctggtgcaggttcagaaggagatggtggcggaggatcgttttaaatctttaatcgtctattatgatgtagatccaatgtaaaggctactctttggttccttgcagaataccggaatctgtatccatattctgaattctcttattggcacccttgtattgttgtccgaagttcagattaaaattgagcttgacaacaatggtatttgacatattcgtactgtgtatatccgattttacaggattcagtgcagaccagttcgcattctcggagcggtaagtcttcataaatggattgtatattcctgccataatagaccatgccggttgtttataacctatcatgagtgtatgcatcagatcacctttcagcaattgttcaccgtatacataccgggtgggtggagtgatggtcataaagctcagaagccacttcttataggaagcatccagattaatacgtaattctttcagggtataggtgtgcaggtaattgtttcctgtacttatataccggttaattcccggtgtaacagaaaggctgatgtgatctttccaaggctttatcttgaatgtgacttccgctgccagatgttggaaggatttctggttttcataagtgtggataaacataccttcttcataaatcacagattccatgatgggattcttttcgtatgcatagctcaccaaagcgtcaatactgaaaattcctgtgctgaatattgcgttaaaatcttgaatcgtactacggaatgattttaagtccgggttacccctacgagtttgtaggatgtcgattctttgctccacatcattcagataagctatggaaggggcgttgtttttcagattgatatgatagcggaaatgcagattgtccacagggttataggatactaagagagaaggttggaggccatatctttcactatggttatctctctggctgtagtagaaacggttgagtgatagattggccatgtatccccaattctgaattttacctttatactcggtgtaggcataactttccgcttgttttaggaggacgttcataatatcttccccttcatagcgattgtctgtataagattgcatatgtctaaggcctcctgtcagtgttccttgccctaattttttctcataaataccttcagctatcagcgaatatttctttccggcaatattggaatataattctgtattggcgatgccttcctgtttctcctgataaatgcgtgtattgctgctcttgatgtacgtgccgacaagattgaatatgagtcgttggtcattctttagattctgctgatagtatagatcgagggatggcaaatggttccgttcctgggtatggtcgtagatggataccgggatgtcggaatcagatgtgtagagtttgctcttccggtcttcatatccggcaggattatcttgcaaggtatatctgaattgtgcattaaagaggtattttcctttttcttgcagagtatagtttaggttggaagctaacaatttcttattgaacagcgttggctctccggtttccaggcgatgaagttccttgtcggggaaaatgaagcgttcgtcatactcacgtgtccagtctcctttacgttgtatataccgcacgttggctgagatttcagactttccgtagttatatcttccggaaatcatatcgtcaatagaggtgcggttgctactgaggctgtggatggcaccgctgctgacgctacctcccgcttttttgtttttggttatataatctatcacggcagcagcgtttccgtagcgtgctcctggagtatcgtgatattctatgcggagaatatcttcggggctgagggaggatatctctgtataagtaacccgaacaccgttgatccgtaattgtacttctccgttgccggaagtggttatttcgcccgacatgatatcaactgtgattcggggaagctgtaatttgcctaataagtctatgccgctggacgacattttcagttgattctgggtcggaagtattactttacggtcgcctttttcgatgatagaccgtgcctggatggtaacttcatccagagagatagccatgactccggtagaatctttagcaatgagttgggcataggaggggctggccatacacagtagtatggtcaaaattgacactattgttttcataatttttgtgggaatagctgttacccggtgggtaaaacagagagtttaaaaatgaggttagtaatttagaaggtcgctatacagtcctttcaaccgttcgcgaaggtggatgacggcataatgttttcgtgataataaagtgttgactgatatcccggtagcactggcaacttctttagctgacaatccttccatttccagtaactcaaatgcttcccgttgttcgggcggtagttcggcaagagctgtttcaagttcttgccacacgagtgaccgcatgtattctacttccggagtaggcggagcatcgctgaacagcacttccgaaaactcgttcagtacgttgtcttctttatcatagcttgaattgggtagttcttcttcctgcatctttttgcctttattgataatcgtatttcgtgctacgcgatatagccatgctgttacctgttcgatgggattgaaagtgctttcaatggttttcaccaattgatacagcacatcttgcagaatatcttcggcatcttctttactggaaacccgcttgcggataaatgctttcaggcggggttgatgttccacaatcagttcttccaaactgttgcctttgccggtcagattattcattctctttgggagtttcgctaccgttgtttctatcaaagtttctctcgttgaagaatccgtctcttccgaaaggaccaccgaatccgaacttctttcttttattaatgaaatccttgcgttcttccggagacatcttctcccatttagcgcggaacgggttaccttctttaccaccgggcattcctcttcggccgggaaagcttcctctgcccgggaatcctccgaagagaatgcgtgcaagtacgaacaatgccagagcttgccagaaattgatggttgccagccctaagactccaggtactgcgaaattccataatagcataactattgctccaaatgccgcaatggctaatacccaaaacaaagatataataaaaaaaccttttttcatgatgttctaattttattgattcacatattactttgaaaacgttctctgtatatgctgacaactgagaagaagaaatattttaagagaatgcaaaaaacttctatatttgcgttcctgaattaaaagaaatgtgcttatgaagcctcatagaatactttttgtttgcctgggtaatatttgccgttcttcctctgcggaaggtgtgatgaatcatttggtttcagaagccggactggaagatcagtttgtgatagactctgccggtattctctcttatcatcgaggagagttgcctgacagccggatgcgtgctcacgccattcgtcgaggttacgaactcacacatcgttcgcgtcccgtacagacggaagacttttataacttcgatttgataatagggatggatgaccggaatattgaagatttgaaagaccgtgcgccttcccctgaagaatggaagaagatacaccgtatgacggaattctgtactcgttttacgcatgccgaccacgtgcccgatccgtattatggtggggcggaaggatttgaatatgtgctcgacttgctggaggatgcttgtgccgggctgttggaacatctgaaataatcgggttcgtcagtgcgtggtgtcttgatagaatctcttgtcttcattcaggctgcatgttgcatccactcctgcactttgtagtacttcggcaatatcattcagggttcggcgcgatacccttcctatataatagaggcgatagtgatagtctttatccaatatctccataacatgcgtaaaagcctgttcgcgtgcaaagtcaaaattgactttgagtatatcttcgtaaggatacttaatttcacgtcctacgctgtatatcctaaggctttcgttatctactttcagataacagaaacgtgtcatcaacatgtgtataaagtagatactcaggccgaatgaaatgattccgagaatatatgcccaccaacttccgaatactacagcctgatatcccaatatcataaacgtgatgaaaagcacaaagaagtagaacatatagagtgatgggcgctgataggtcgtggtcggaatctctgctactgtccgttttcgggtgatatggttctcaaaaggtatatcttgtgaaatcagatagcggataacagatgacggcttttgaaacggatggacataaaaagctctttgaataccctgttttaggcgcaatgttaatatgcccgcgccatatttatctttgaccttcaggttgctcttgcgcggaacttcatgaaaacgtttcatgaaactgaaactttggatgtcgtgtagccggatacctctgcgttgtagcaggctttcggtacgtttctggtcttgtgcgattgttttcatatcttttattttttaagttcgggatagctgatgcgggtatgataaattgttttcagtttctctttgaacaccgatttcacgatagcaatgtccttgaatgtaataggacattctttgaagaaaccttcttctacctgagagtctataatcttttccaccagattgttgatgctctcttccgtatattcgggcagactacgggatgcagcttctactgcatccgccatcatcagaatggccgtttcgcgggtgaacgggtttggaccggggtaagtgaataattcctcgttcggctcttcatcgggatgctcgttcttccaagagatatagaagtatttagtctttcccttaccgtgatgggtactgatgaagtcttttatcactttaggcaaattgtttttttctgccagtttcagtccgtccgtcacgtgactgattatcacctgtgcactttgctcgtagctaagatttttatgcggattgacacctcctgattggttttcagtaaagaataccggattttccatttttccgatgtcgtggtacaaagctccggtacgcaccaactggctcttagctccaatacggttggcagcttctgcggcaagattagccacttgcatggaatgttgaaaagtgcccggaacagtctctgacaaacggcgcagcaacgggctgttgatattggaaagttctaccagagtaacgttggaagtaaatccaaatgttttctccaacaagaacagaagcggataggtgaacaatagaagtataccattgactataaagtaactatacatacttccgtttaatttcgataaatcgttttcggtgatcagttcgaaagcgaagtaaagagcagcataggtcagtatcactaataatgccgtacggaagagttgcgaacgttgtgacaattcgcgcaaactgaaaatagcgaccagaccggcagccagttgcagcaatataaattcgtgtgggtagcgtagacaaatggagcagatcagtatagtgaccacctgcgtaaggaatgctgtgcgtgaatcgaggaatacgcggataatgataggcagcatggcatacggaatgatataaacattgtatatgttattcgacaccatgagtgctgtcactacacaatagaacataatcagtgtaaaaagtagggataaactccccttgcgttcgtaataatccttgcggaataaatcgaggtacagcataaaacacagcatgaaaatgctgacaaataagatttgtccggtcaatatcaaacgtttttgtccgatggattcactacgttggatagactcctttctcagactttcaaggatattataagtttccttatctacgatttccccccgatcaataatcttctggccactttgtacaacaccattggcccaggcataattatccagtgcttccttcttggctgtttcggtgcgttgctcatcgtaagtcagattagggtacaaatattcgttgagtgaacactggcgcaggatatacggagaataatgtgccgtgtccgcagtgagcaggtaggcataagcgtctttaacggaaaaaagctgttcggtcccccgctggttggccagcttatcatcaatcaccatgatgacagcggtgctgtctttttgtaatttgctgcgttcttcagtagaaagtatacctgctttataaatttcggataaccttttctccagatagcgcatatagtcagaagacggaacaatgtcgcgtaagtgactttgataatccgtttttaatttgctaagcacggttttttctacatttttatccaactgatagtagggttggaaactggcaagaatgctgtcttgttcatgttttactacagcatcatctttatatatggggaaattgaatgtggccataagttgcccatacttccatggtttgtcaatatcgaactgataattaaacttgccgtcacgcggtaagaagtatactatgatggctaccgtgccgataaaaatgagtgctttgtatagcaaatctctgtaagaaaagctttttttagtcttgaatttattcatatcggttgaattttttgcgaaaagtacaaaaaaaaacattagtgtggaaaaaaaggtttaattttgccgtctaattatctcataagtaatgcaaaatatgacagaaagaagagtcagagtccgttttgccccgagtcctacgggggctttgcacattggtggtgtgcgtacagcattatataattatctctttgcgcgccagcatgggggagacatgattttccgtattgaagatactgatagtaaccgttttgtaccgggtgcagaagaatatatccttgagtctttcaagtggttgggcattccgtttgatgagggtgtcagcttcggtggagagtatggtccgtaccgtcagtccgaacgtcgcgaaatatacaagaagtatgtgaaggtattattggagaatgataaggcttatatcgcttttgatactcctgaagaactggatgcgaaacgtgccgagatagccaatttccaatatgatgcttctactcgtatgcaaatgcgtaattcattgacactttcgaaagaagaagtggatgcattgattgctgaaggtaagcagtacgtagttcgtttcaagatagaacccaatgaagatgtacatgtaaacgacttgattcgtggtgaggtaataatcaattcttccattttggacgataaggtactttataaatcagctgacgaactgccgacttatcatcttgccaatattgtagatgaccacttgatggaagtttcccatgtgattcgtggtgaggagtggttaccttctgcacctctgcatgtattgttgtatcgtgctttcgggtgggaagatacaatgccggcttttgctcatctgcctctgctgttgaaaccggaaggtaacggcaaattgagtaaacgtgacggtgaccgccttggttttcctgtattcccgttggaatggcatgatcccaaaaccggtgaaatatcttctggatatcgcgagtcgggatatttgcctgaggctgtaattaatttccttgctttgctgggttggaatccgggtaatgatcaggagctgatgtcaatggatgagttgatcaaattgttcgatttgagtcattgtagcaagtctggcgctaaatttgattataaaaaaggcatctggttcaatcatgagtatatattgttgaagcctgatgaagaaatagcggaactttttgttccggttctgaaagaacatggagtagaagttccgttcgagaaagtagtaacggtggtaggcatgatgaagaatcgtgtaagtttcgtacgggaactttgggaagcatccagtttcttctttgttgctccaacggaatatgatgagaaaaccgtgaagaaacgctggaaagaagattcggcccagtgtatgacagaattgatggaagtactggcaggaattgaagattttggcattgagaatcaggaaaagattgtaatggattggattgccgaaaaaggatatcataccggaaacattatgaatgctttccgcctgacattggtaggtgaggggaaaggcccgcatatgttcgacatctcttgggtgttgggcaaagaagagacactggcgcgtatgaagcgtgcaattgaagtactttcttaattcaataagtatgctttacgaccttgcgataggtatctatgaccttttggtgcatcttgcggctccattcagccgcaagccccgtaaaatgatgaaggggcattgggtagtgtatgaacttctcaggcaacaattggaaaaagatgtacgttatatttggtttcatgccgcttctttaggcgaatttgaacaggggcgtcccctgattgaaaaaattcgtgccaaatatcccgattatggtatattactgacattcttttctccttcgggatacgaggtacgcaaaaattatcgcggggcggatgtagtgtgctacctaccgttcgacaagcctcggaatgtgaagaaattcttggatatagccaatccttgcatggcattcttcattaaatatgagttctggaagaattatctcgatgaattacataagcgtcgtattccggtgtacagtgtgtcatctatatttcgtcgtggccaggtgttctttaaatggtatggtggtacgtatcgccatgttcttcgtaatttcgaccacttattcgtacagaatgaacgttccaaacgttatttgagtaagattggcatcaaccgtgtgacagtggtcggcgatacgcgtttcgaccgggtgttgcagatacgtgaggaggcgaaagatttgcctttggtgaaactctttaagaataacaccatgaccttcgtagctggtagttcctggcaaccggatgaggatctgtttattgaatatttcaataatcatccggaagtgaaattgattattgctccacatgtgatagatgagaatcatctggtagagattatccggaagttgaaacgcccatatgttcgttatacgcgtgcggatgaaaagaatgtgctgaaagcggattgtttgattatagattgtttcggtctgctttcttctatttaccgttatggtgaaattgcatatatcggaggtggcttcggggttggtattcataatacgttggaagcagctgtttatggtatcccggtaatattcggacctaagtaccagaagtttatggaggcaattcaacttttagaagcccagggtgcattctctatcaagaattatgaagaactgaaagaattgttggaccgtatgttggctgatgaggttttcttgcgcgaaaccggaacgaatgccggatactacgtcactagtaatgctggggctacggataagatattaagtatgattaatttctaaggaatacgaaataatgagaacagcgagcggatagatttctattcgcccgctgtcgtatatggaagttcatctggctttattctttataccagttagaatacatcagataattatgtgctatcttctgattcagttctttagcctgagccggatctactttttttatgaacttggcaggtacaccgccccagatgcttcccggttcaataactgtattgcttaagaccagtgaaccggcggcaacgatagctccttcgcctatcactgcatggtcaaggattgtagagcccattcccactaatgcatagtctttaatggtggctccgtgaatagtaacattatgtcctacggaaacgtggtcacctatttcaattgtagacttttcatataatgtgtgcagcacacttccgtcttgtatattgactccattcccgatacggatagaatttacatctccgcgcaatactgtgctgaaccaaatgctgcaatcgcgccccatttttacgtctccgatgatggctgcgttatcagctaaaaaacaattttcgccaaactcgggagtaaaccctcttactgatttaattaatgccattttatatagtggttaatattttgattataattgattcgttgcttctttcaaccatgcctgttcttctttgttcaagctgggcgataatttctcatatacagtctgatgatattggttaagccaattgatttcttctgatgtgagcaattctttgataattccctttttacaaatagggcaaagggttactgtctcaaattgtagatagttgccaaacattccttctccggctggtactactaaaaccagattctccgtacgaatcccatgacttccggctttatatactcccggttcattggaagtcagcatacccaattgcaatgttaccggattttcattcatacgaatactctgaggtccttcgtgtacattcagaaagtggcctacaccatgccctgtgccatgcaggaagttcattcttctttgccatatcggcatacgtgccagcacatctagttgcgcaccccgtgtaccggcagggaatacggccattgccagtgcaatgtgccccttcagtatcaatgtataatctgtcttttcttcttctgtcagttttcctagagcaatggtacgtgtgatatctgttgttccatccagatattgtgcacctgaatccaataacaaaaaaccttccggttttagctggacatctgtttcgggagtggcttcatagtgcacaatggctccatgttccttgtatccggcaatcgtatcgaaactttctcccatatataaatcctgctccgcacgaaattcatgcagttttttatctacgctgatttcagtttccttacccgttggaacagatgcttctaaccatttcagaaacttaaccaaagctactccatcccgttgcatggcagcatgtattccagctatttcctgttcgttgcggatggctttcaataaggtgaccggagaagcaccatgaataatcctgcaatcagggttgacagctgaatacatagcataatttgttttagccggattcagaagtaggctctcaacgctgatccggctgaggtatgtttctgcttcctcgtaggcgtgcaggtttactcctgtttctttcatataagtagcaacctcagcggttatcttttgaggttgaatgaaatagtgagtttcgttctcttcgataagtagatagctgacaagcacgggattgcaatgtacatcgtttccacgcagattaagagtccatgcgatttcatctaaagcggataagaacaatgccttcgcattgcacttttttagttcttttcgaataatggtaatcttttctatgctgctttttcctgcatattgggtttcataaataaaagcaggagcttccggcattggcggacgatctgtccataatttatctaagggatctgaaatgctttttacttctatctggcatttttgcaactcagcttgcattttttctacttcttctgccgaaaacatctttccatctatgccgacagtatcgccaggagttagttgtgtgcttaaaaaagttgaaatactgggtgtttcgggaagcatctccttataaagttttatttccgtgccttctaattgctgggcagcctggagaaaatagcgagagtcagtccatagtcctgcttggcttgtagtaataacaacggttcctgccgaacctgtaaagccggaaatccattcccgggatttccagtggggagcaacatattcgctcagatgagggtcggtacttgggataataaaggcttgtatgccttcctggctgaacaatgcccgtaggtcttgtagccgatcattgatagtttggctcatatactatatataataaggtgtaacattcactcttcaaagatactcactttctctgaatcttttcgaaggatggctacactttatttgtaccagctactcgtagccggtagctcgtaactatactgtaacgagtgatcttggcgtttctattgttttttcttataagttttagctttttcattagtagagatttattctttccatcacggagaaagtttctttccaccgcggggtacttttctttccaccgcggtggaaagaaaagacccccgcggtggaaagaataagtatttgctacggtcgcgcttagttttcacaagagaaggagataaaagtggcgatatggtggcttaattttgcattttgcaacttattctttacctgtttccttttttattgacccggatttatttttctgtaggtctaaatcttgtttctttttgcagaattttcggcagaaagttttgtgaataaagaaactatgtgtaattttgccgctcaatttaatcgtgagatttttaaaccattaacattttaataaaaagaaaatgattgtagtacctgtaaaagaaggcgaaaacattgaaaaagcgctgaagaagtttaaaagaaaatttgagaaaactggtatcgttaaggaattaagaagcagacagcagtttgataaaccgtctgtagttaaaagacttaagaaagaacgtgcagtttacgtacaacaacttcagcaagtagaagattaataattcgtaatttcctttgaattattgaattcttttcatacattcgttgcatgatttagatatgtagcgatatgttattgacagattcttttcttgactatcttctgtatgaacggaattatgccgagggtacggttaagtactatcggagtgatatcttggaactacagaaatttggtgaagaaatgttgggagatttaactccgtcggatgtagatgcagagcttgttcgtgagtggattgcttccttgatggacaatggttgcgcttcgaatacgattaatcgaaagttaagttcaattcaggcatattttaaatatcttttaaagaagggggaagttgctatagatccgttacaaaaaataacgcgaccgaaaaagaaaaagccgcttcctgtttttctgagagaaggagaaatggataaattgctggatgatatagactttggtgaggggtttgaagggtgtcgtgaccacttgataattgagatgttttatgctaccggcatacggctttctgagttgatagatctggatgataaagacgttgatttttcggcttctctcataaaagtgacggggaaacgaaataaacagcgtttgataccttttgacggagagttgggacgctcgatgatggattatgtcaatgtgcggaatgaagcggttttggttcgttcggatgctttttttgttcggaagaatggagagcggctttgtcgcagtatcgtaactaatcttgtgaaacggaatctctcgaaagtagtaactgtaaaaaaaagaagtccccacgttctgaggcatacctttgcaacggctatgctgaataatggtgccgatttaggctcgataaaagagcttcttggtcacgagagtttggcgacaacggaaatttatacgcatactacttttgaagaacttaaaaaagtgtataaccaggctcatcctcgggcctaaaagtaaggaggtaagtatggaagttagaattcagtcaattcactttgatgcgtcagagcaattgcaagcttttgttcagaagaaagcagtaaaattggaaaagtattacgatgatataaagaaagtagaggtgtcattaaaggttgtgaagccggagactgcagaaaataaagaagcaggtataaaagtgattattcccaatggggagttttatgcaagcaaaatctgcaatacgtttgaagaggcgattgatttgagtgttgaagccttggaaaaacagctggttaaacacaaggaaaaacaacggagcaaataaaatttcgctaaaattttgcggaaaagaaataaatgcctaaatttgcagccgtttcgctcacgatagaacgtaacggttgcattttttgagtaattgcctctttagctcagctggccagagcacgtgatttgtaatctcggggtcgttggttcgaatccgacaagaggctcaaaaaataataaggaaaaaagagttctttatttaaatgtaagggcaaataccagagtggccaaatggggcagactgtaaatctgctggcttacgccttcggtggttcgaatccatctttgcccacacctctttttctccttgctgttatagctcagtggtagagcacttccttggtaaggaagaggtcccgggttcaaatcccggtaacagctcgtaaggatgtaaatgctgattattaatcaaataaataacaagtaaagctatggctaaagagaaattcgaacgtaccaaaccgcatgtgaacattggtacaattggtcacgttgaccacggtaaaaccacgttgactgctgctatcactacagtgttggcaaagaaaggtctttcagaagttaagtctttcgatcagatcgataatgctcctgaagaaaaagaaagaggtatcactatcaatacttctcacgtagagtatgaaaccgctaaccgtcactatgctcacgtagactgtccgggtcacgctgactacgtaaagaacatggtaactggtgctgctcagatggatggtgctatcatcgtagttgctgctactgatggtccgatgcctcaaactcgtgagcacatcctgttggctcgtcaggtaaacgtaccgaagcttgttgtattcatgaacaagtgcgatatggttgacgacgaagaaatgttggaactcgttgaaatggaaatgcgcgaactgttggctgcatacgaatttgacggtgacaatactcctattatccgtggctctgctcttggcgcattgaacggtgtagaaaagtgggaagacaaagttatggaactgatggatgcagttgatacttggattccgctgcctccgcgtgatgttgataaaccgttcttgatgccggttgaagacgtattctctattactggtcgtggtactgttgctacaggtcgtatcgaagctggtatcatccacgttggtgatgaagttgagatcctcggtctgggtgaagataagaaatctgttgtaactggtgttgaaatgttccgcaaattgctggatcagggtgaagctggtgataacgtaggtttgttgcttcgtggtatcgataaggaatctatcaaacgcggtatggttctttgtaaaccgggtcagattaaacctcactctaaattcaaagcttctatctatgttttgaagaaagaagaaggtggtcgtcatactccattccacaacaaataccgtcctcaattctatctgcgtactatggactgtacaggtgaaattactcttccggaaggaactgaaatggtaatgcctggtgataacgtagaaatcaacgtagaattgatctatccggtagctttaaacgtaggtttgcgttttgctatccgtgaaggtggccgtacggtaggttctggtcagattactgaaatccttgactaattaccaaatatattaatcagttcccggtttatatcgggaactgattatattcacacgggagtagctcagttggtagagcaccggtctccaaaaccgggtgtcgggagttcgagcctctcctcccgtgctaatatttttgaaatgaagaagattgtagcttattttaaagaaacttacgacgaacttgtacataaagtatcgtggcctacgtattctgaacttactaacagtgcagtagttgttttatatgcttccctgcttattgcattggtagtattcgcgatggatttctgtttccagaacgtaatggagaaaattatttatccacactaaaaacgagggaaaatgtctgagattgagaaaaaatggtacgttttgcgtgctattagcggaaaagaagctaaggtaagggaataccttgaagctgatattaaaaacagcgaccttggtgattatgtatctcaggtattgattcctaccgaaaaggtttatcaggttcgcaatggaaagaaaattgtgaaagagagaagttatctccctggttacgttttggtggaggcagctctggtaggtgaggtcgctcatcacttgagaaatactcctaatgtgattggattcttgggtggatcggataaacctgttcctctgagacaatcggaagtgaatcgtatacttggtacggtggacgaattgcaggatgccggtgaagaactgaatatcccgtatatagtcggtgaaactgtgaaagtaaattacggcccgttcagcggattcagtggtatcattgaagaagtgaacaccgagaagaagaaacttaaggttatggtaaagatattcggacggaaaactccgctcgaattgggctttatgcaagttgaaaaagaataatgcaggtgttacgctgtggtattctttattaatgtttatatataaatcaataaaaaaatggctaaagaagttgctggactaatcaaattacagattaaaggaggcgcggcaaacccatcacctcccgtaggccccgctttgggttctaagggtattaatatcatggagttttgcaagcaattcaacgccagaacccaggacaaagcaggaaagatccttcctgtgattatcacttactacgcagataagtctttcgattttgtaatcaagactcctcccgttgctattcaattacttgaagtggctaaggtaaagagtggttctgctgagcctaaccgtaagaaagttgccgagcttacttgggaacaagttcgtgcgattgctcaggacaagatggttgacttaaactgtttcactgtagaagctgccatgtcaatggttgccggtacagctagaagtatgggtatcgctgtaaaaggggagttcccggttaataactaataaacttcaattagaatgggtaaactgacaaaaaaacaaaagttggctgcagaaaaaattgaagcagggaaagcatactcactgaaagaagctgcatctttggtaaaggaaatcacttataccaagtttgatgcttcactggatatcgacgtgcgtttgggcgttgatccgcgtaaggcgaaccagatggtgagaggtgttgtatcacttcctcatggtactggtaaagttgtgcgcgttttggtgctttgtacaccggatgctgaagctgctgcaaaagaagccggagctgactacgttggtcttgacgaatatattgaaaagatcaaaggtggatggacagatgtggatgtaatcatcactatgccttctatcatgggtaaaattggtgcactcggtcgtgtgctcggtcctcgcggattgatgcctaacccgaagagtggtactgtaactatggatgttgctaaagctgtaagagaagtaaaacaaggtaagatcgacttcaaggttgacaagagtggtattgttcatacttcagttggtaaagtttcatttagtgttgatcaaattcgtgataatgcgaaagaattcatctctactttgaataaattgaaaccgaccgcagccaagggtacatatattaagagtatttatctttctagcacaatgagtgcaggtatcaagattgacccgaaatcagtagaagaaatctaataaaacggagtaataatgagaaaggaagataaaagtacgattattgagcagattgctgctacagtaaaggaatataatcacttctatttgatagacatcactgcaatgaacgctgccgctacaagcgcgttgagaagagaatgtttcaaatcagacatcaaattgatgctgattaagaatacattgcttcacaaagcattggagagtctggaagaagattattctccgctttataattgcttgaagggtactacagctattatgttctgtaatactgccaacttaccagctaagttgattaaagcaaaagctaaagacggtattcccggactgaaagctgcatatgcagaagaaagcttctatgttggtgctgaccagttggatgctctcgttagtattaagagtaagaatgaagttattgccgatattgttgctttgttgcaatcaccggccaagaatgttatttctgctctccaatcgggtggaaacactcttcacggagttctcaaaactcttggtgaacgtaccgaagcgtaaaaatgggaaaggtgtcatgaccttgggagtaacgtcccgaataaattttcataaacaaattagtaattaaacaattaaaatcatacaaaaatggcagatttgaaagcttttgcagaacaattagttaacttgacagtaaaagaagttaatgaacttgcaactatccttaaagaagaatatggtattgaacctgctgctgcagctgtagctgttgctgctggtcctgcagctggtggtgctgctgccgctgaagaaaaaacttcttttgatgtagtattgaagagcgctggatcagctaaacttcaggttgttaaagccgtgaaggaagcttgtggtcttggcttgaaagaagctaaggacttggtagacggtgctcctagcgtagtaaaagaaggtttggctaaagacgaagcagaatcattgaagaaaacattggaagaagctggagctgaagttgaacttaaataacattagcctgtaaatcaggtaattcggttaagaacccttctgaagagggttcttaacctttttgtgtatatatttaaaattaagttctacaaatccattaacagatgtcttcaaatactgtaaaccaaagaattaattttgcttcgactaaaaatccacttgaatatccggattttttggaagtacaattgaagtcattcaaagactttttacaactggataccccacccgaaaagcgtaagaacgagggactgtataaagtatttgctgaaaacttccccattgccgatacaagaaacaattttgttcttgagtttttggactactatattgatccgccgcgttatactattgatgattgtatagagcgagggcttacttatagtgtgcctttgaaagcaaaattgaaattatactgtacagatcccgatcatgaggattttgatacagttattcaggacgtattccttggtcctattccttatatgacggataaggcgactttcgtcatcaacggtgcggaacgtgttgttgtatcccagcttcaccgttctccaggcgtattcttcggtcagagcgtacatgctaatggtaccaaactttattctgcccgtatcatcccgttcaaaggttcttggattgagtttgctactgatattaacaacgtcatgtatgcgtacatcgaccgtaaaaagaagttgcccgttactactttgttgagagctatcggttttgagaatgataaggatattcttgaaattttcaatctggccgaagatattaaagtcaataagactaatcttaagagagtgttgggacgtaaattggcggctcgtgttttgaaaacatggattgaggattttgtagacgaagataccggtgaagtagtttctattgaacgtaacgaagttgtgatcgatcgtgaaactgtgatcgaaccggaacatgttgatattatcttagagtcgggtgttcagaacattcttgtacacaaggaagagccgaatcagtctgactattctattatatataacacgctccagaaagacccgagtaactcggagaaggaagctgtattgtatatctatcgccagttgcgtaatgcagaccctgccgatgatgccagtgcacgtgaggttatcaataacctgttcttctctgaaaagagatatgacttgggtaatgtaggtcgctacagaattaacaagaagttgaatctgacgactgatatggatgtgcgtgttcttacgaaggaagatattattgaaatcattaagtacttgatcgagttgattaactcgaaggccgatgtggatgatattgaccatttgagtaaccgtcgtgtacgtactgtaggagagcaattgtctaatcagtttgctgttggtttggctcgtatgtcgcgtacgattcgtgaacgtatgaacgtacgcgataatgaagtgtttactccgattgatttgatcaacgccaagactatttcttccgtaatcaattcattctttggaacgaatgctttgtcgcagtttatggaccagacgaatccgttggctgaaattacgcacaaacgtcgtatgtctgctctcggtcctggtggtttgtctcgtgagcgtgccggatttgaggtacgtgacgttcactacactcactatggtcgtctttgtccaattgaaacgccggaaggtccgaacattggtttgatttcttctttgtgcgtgttcgctaagatcaatgtacttggtttcattgaaactccatatcgtaaggttgaaaacggtaaggttgacctttctgatgaagggttggcatatttgactgcggaagaagaggaagctaagattattgctcaaggtaatgcaccgttgaatgatgatggtactttcatccgcgataaagtaaaagctcgtcaggatgctgactatccggtggtaactccggatgaagtagagttgatggacgtttctccccagcagattgcttcaatcgctgcatctctgattcctttcttggaacatgatgatgctaaccgtgcgttgatggggtcaaacatgatgcgccaggcagttcctttgttgaagagtgaagctcctattgtaggtacaggcatcgaacgtcagttggttcgcgactctcgtacgcagattaccgctgaaggtgatggtgtaatcgaatttgtggacgctactgttatccgtattttgtatgatcgtacggaagacgaagaatttgtaagcttcgaaccggcattgaaggaataccgtattccgaagtggcgtcgtacgaatcaaaatatgacgattgaccttcgtcctatttgtgaaattggtcagcgtgtaacgaaaggccagattttgacagaaggatattctacggaaaaaggtgagttggctttgggtaaaaacttgttggttgcttacatgccgtggaagggttacaactatgaggatgctatcgtattgaacgaacgtgtggttcgtgaagatatattgacttcaattcatgtagaagaatattcgctggaggttcgtgaaacgaaacgcggtatggaagaattaacttccgatattccgaatgtgagtgaagaagcgactaaagatttggacgaaaatggtattgtacgtgtgggcgctcgcatccagccgggtgatatcttgattggtaagattacaccgaaaggtgagtctgatccgtcaccggaggaaaaattgcttcgtgcaattttcggcgataaggcaggtgatgtgaaagatgcttctttgaaagcttctccttctttgaaaggcgttgttatcgataagcgtttgttctcacgtgtaatcaagagtcgtagttccaaattggctgataaggctttgttgccgaagattgatgatgagtttgatgcgaaggttgctgatttaagaggtgtcttaattagaaaactgttgaagttgactgaaaaccatgtatcagagggtgtaaaagattatatgggtgctgatattatttcaaaaggtgccaaattctctccttctgatttcggtgatttggattttacttcaattcaattgagcaattggacgaatgatgatcgtatcaacggcatgattcgtgatttggtgatgaacttcatcaagaaatataaagaactggatgccgaactgaaacgtaagaagtttgctatcactattggtgatgaacttcctgctggtattattcagatggcgaaagtttatattgctaagaaacgtaagattggtgtaggtgataagatggcaggtcgtcacggtaacaagggtattgtttcccgcgttgttcgtcaggaagatatgccattcctcgctgatggtactccggtagatattgtattgaatccgttgggtgtgccttctcgtatgaacatcggtcagatattcgaggctgtattaggtcgtgctggtaagaatctgggtgttaagtttgcaactcctatttttgacggtgctacattggatgacttgaatgagtggactgataaggctggtttgccacgttatggtaaaacaaagttgtatgatggggggacgggtgaaccgtttgatcaacatgctacggttggtgttacctatatgttgaagctggggcacatggttgaagataagatgcacgcacgttctattggtccgtactctttgattactcaacaaccgttgggtggtaaggcacaattcggtggccagcgttttggagaaatggaggtttgggcgcttgaagcatttggtgctgcgcacatcctgcaggaaattttgactatcaaatccgatgacgttgtaggtcgttctaaagcttatgaagcaattgtgaagggtgaaccgatgccgcaacccggtattcctgaatcgctcaatgtattgttgcatgagttgagaggtttgggtctcagcatcaacctggaataaatctaaaattaatagttgggagtgataatctatttgctcccagctattaattctcaatattcaattgtcaattttcaattatatataataaagtatggcttttagaaaagataacaagataaagagtaatttctcgaagatctctattggtttggcttctccggaagaaatccttgagaattcgagtggtgaagttttaaagcctgaaactatcaactatcgtacgtataagcctgaacgtgacggtttgttctgtgaacgtatttttggtcctatcaaggattatgaatgccattgcggtaaatataaacgtatccgttataaaggtattgtctgcgaccgttgtggtgtggaagtgacagagaaaaaagtacgtcgtgagcgtatgggacacattcagttggttgtgccggtagctcatatttggtatttccgttcacttcctaataaaattggttatttgctggggctgcctacaaagaaacttgattctattatttattatgagcgttatgtggtaatccaggctggtgtgatggctggtgagattgctgaatatgacttgctctcagaagaagaatatctggatttgatggagaagttgccgaaagacaatcaattcctggaagattcagatcctaataagttcatagctaggatgggtgccgaagccatttatgacttgctggctcgtctagatttggatgcattgtcttatgatttgcgtcaccgtgctggcaacgatgcttctcaacagcgtaagaatgaggctttaaagcgtctccaggttgttgaatcattccgtgcatctcgcggacgtaataagccggaatggatgattgtacgtatcgtaccggttatcccgcccgaacttcgtccgttggttccgttggatggtggtcgttttgccacttctgacttgaatgatctttatcgccgcgtaattattcgtaacaatcgtctgaaaagattgattgagataaaggctcctgaagtaattttgcgtaatgaaaagcgtatgttacaggaagcggttgactcgttgttcgacaattcacgtaagtccagtgcagtaaaaacggatgctaaccgtcctttgaaatctctttccgatagtttgaaaggtaagcagggacgtttccgtcagaacttgttgggtaaacgtgttgactactctgcgcgttcggttatcgttgtaggtccggaactgaaaatgggggaatgtggtattcctaaattgatggcagctgaactgtacaaaccgttcattatacgtaagttgattgaacgtggtattgtaaagaccgtgaagagtgccaagaagattgtggatcgcaaagaagctgttatctgggatattctggaacatgtaatgaaaggtcatccagtactgttgaatcgtgcgccgacattgcaccgtttgggtattcaggcattccagcctaagatgattgaaggaaaagctattcagttgcacccgttggcatgtacggctttcaatgctgactttgatggtgaccagatggctgttcacttgccgttgagtaatgaagctgttttggaggctcagatgttgatgcttcaatctcataatatcttgaatccggcaaatggtgctcctattactgtgccttctcaggatatggttcttggtttgtactacattactaaattacgtaagggggcaaaaggcgaaggcttgatattctatggtccggaagaagctttgattgcttacaatgagggtaaggttgatattcatgctccgatcagcgttgttgtgaaggatgtagacgagaatgggaatgttgttgatgtaatgatgcatgacacttcagtaggtcgtgtaattgttaacgaaattgttccccctgaagctggttatatcaataccattatttctaaaaaatcacttcgtgatattattagtgatgtaattaaggtatgtggtgtggctaaagcagctgatttccttgatggcatcaagaatttaggttatcaaatggcctttaagggtggtttgtcatttaacttgggtgatattatcatcccggaacaaaaagaggcattggtacagaaaggttatgatgaagttgagcaagttatcaacaactataacatgggtttcattaccaacaatgaacgttataatcaggtaattgatatttggacacatgttaactcagagttgtctaatatattgatgaagaccatttcgagtgatgaccaaggattcaatgctgtatatatgatgctggattctggtgcccgtggttctaaagagcagatccgtcagttgtctggtatgcgtggtttgatggcaaaaccgcagaaggcaggtgcagaaggtggacagattattgaaaacccgattctttcaaactttaaagaggggctttcggtgttggagtactttatctctacccatggtgcccgtaaaggtttggcggatacagcgttgaagacggctgatgccggatatttaactcgtcgtctggttgacgtatctcatgatgtgattattaatgaagaagactgcggcacactccgtgggttggtttgtacagacttgaaaaataatgatgaaattattgctacgctgtatgaacgcatccttggtcgtgtatctgtacatgatattgttcatcctacaacaggtgaattgttggttgccggtggtgaagaaataacagaagaagtagctaagaagatacaggattctccgatagaaagtgttgaaatacgttcggtattaacttgtgaatcgaagaagggtgtttgtgcgaaatgttatggacgtaaccttgcaacaagtcagatggttcagagaggtgaggctgttggtgtaattgctgcacagtctatcggtgagccgggtacacagttgacgttgcgtactttccatgccggtggtacggcggctaatattgcagctaatgcaagtatcatggctaagaatccggcgcgtctggaattcgaagaacttcgtactgtagatgttgtggatgaagctggtgaacctgcaaaagtagtggtaggccgtttggctgaagtacgttttgtagatgtaaatactgggattgttctttctactcataatgtgccttatggttctacactttatgctgctgatggcgaagtcgtagaaaaaggtaaaatgattgcccgttgggatccgtttaacgctgttattataacggaagctacaggtaagattgagtttgaaggcgtaattgaaaatattacttataaagtagagtctgacgagtctaccggtttgcgtgaaatcatcattattgagtccaaggataagacgaaagttccgactgctcatatcatgacagaggatggcgaactgattcgtacgtataatctccctgtgggggggcacgtagtagtggaaaacggacaaaaagtgaaagctggtgaggttattgtgaagatacctcgtgccgttggtaaagctggtgatatcacgggtggtcttccgcgtgtaactgagttgttcgaagctcgtaatccgtctaatcctgctgttgtttctgaaatcgatggcgaggttacgatgggtaaggtgaagcgtggtaaccgcgaaattgttgtgacttctaaaactggtgaggttaagaagtatctggtaccgttatctaaacagattctggttcaagagaatgactatgtgcgagccggtactccgttgtctgatggtgctataactccagctgatattcttgctattaaggggcctacggctgtgcaggaatatatcgtgaacgaagtgcaggatgtataccgtttgcagggtgtgaagattaatgataaacactttgagatcattgttcgtcagatgatgcgtaaagttcaaattgatgagcctggcgatacacgcttcttggaacaacaggtagtggacaagttggagttcatggaagaaaacgatcgtatctggggcaagaaagttgtggttgatgctggtgattcccagaatctgcaaccaggtcagattgtaaccgcccgtaagttgcgtgatgaaaacagtatgttgaaacgtcgcgacttaaaacctgttgaagtacgtgatgctgtccctgcaacttctactcagattcttcagggtattacgcgtgcagctctgcaaacttcaagctttatgtctgctgcttcattccaggagactactaaggtcttgaacgaggctgctatcaacggtaaggttgataaattggaaggtatgaaggagaacgttatttgtggtcatttgatacccgcaggtactggtcagcgtgagtttgaaaagattattgttggctccaaagaagagtatgaccgtatccttgctaacaagaagacagtattggattacaattcaatggatgttgaagaataagatgtaataaatacagtcagttgattattaaataggaaagaggagatatcttgtataggatgtctcctcttttgtttttggaataaaatattattcttacctttgaatactcaaaagcttaatcgtaaaacgaaaatggaaaacagagaaatgaataatcagttacaaatagaactgaaagaagatgttgcgcaaggtacgtatgctaatttagctgtgatcacacattccagttctgaatttatagtagattttgtacgtgtaatgccgggaatacctaaagccagtgtgaagtctcgtattgtactggctccggaacatgcaaagagattattgcgtgctttggaagaaaatataggtaaatatgaacgtacatttggctccatcagattgttggatgaacaatcaattccacctatgacgaacctcaaaggggaggcctaaaatcaaaaaaaaacttgtagtgcattgattattcaaatattattcgtatttttgcagcccaaaagtgtatagctacgaaattaatataacaataatatataattaaaaacaattaaaatgcctacaattcagcaattagtaagaaaaggacgcgaggtgttggtggagaaaagtaagtcaccggctcttgattcatgtcctcaaagacgtggcgtttgcgtgagagtgtatacaaccactccgaaaaaaccgaattctgcaatgcgtaaagttgcgcgtgtacgtttgaccaatggtaaagaggtgaactcttacattccgggagaaggacataacttgcaggaacactctattgtattagtacgtggtggtcgtgtaaaagaccttccgggtgtacgttatcacattgttcgtggtacattggatactgcaggtgttgcaggtcgtactcaaagacgttctaaatacggatctaaacgtccaaaaccgggacaacaggctgcaccggctaagaagaaaaaataaatagtagccttacactgtaaacagttaaattaaaagtaataacttacgttttagtttattggaaatgctaaaggttgagtaaattctccggagggagagttgaagaagtcaagaagtaaacaaccaagaacgaaaaacattattctttcaaacaaatgagaaaagcaaaaccgaaaaaacgcgttatcctgccggatcccgtgtttaatgatcaaaaggtttcaaaattcgtaaaccatctgatgtatgacggaaagaagaatacctcttatgaaatcttctatgccgctctggaaacagtaaaaacaaaacttcctaacgaagaaaaatctgcccttgaaatttggaaaaaggcattggataatgtaactccgcaggttgaagttaagtctcgtcgtgtaggtggtgctacattccaggttcctactgaaatccgcccggaccgtaaagagtcagtttctatgaagaacttgatcctttttgctcgcaagcgtggtggaaaatcaatggctgataaattggccgctgagattatggatgcgtataatgaacaaggtggtgctttcaaacgtaaagaagatatgcacagaatggctgaagccaaccgtgcatttgctcatttcagattctaatactataagaataaccgatagattaaaaacttaaagtaaaaggaattaaaaaatggctaagcaagatttacatttgacgcgtaatattggtatcatggctcacattgatgccggaaaaacaacaacctctgaacgtatcctgttttatacgggtttgactcacaaaattggagaagtacatgatggtgctgctacaatggactggatggcgcaggaacaggaacgtggtattaccattacttctgctgctactacaactcgttggaaatatgcaggtgatacttataaaatcaacttgattgatactccgggacacgttgacttcactgctgaagtagagcgctctttgcgtattttggatggtgctgttgctgcatattgtgcagtgggtggtgttgaaccgcagtctgagactgtatggcgtcaggctgataagtacaatgtgccgcgtattgcttatgtgaacaaaatggaccgttctggtgctgatttctttgaggtcgttcgccagatgaaagccgttttgggcgctaatccttgcccaattgttattcctataggtgctgaagagtctttcaaaggtctggttgaccttatcaagatgaaagctatctattggcatgacgaaactatgggcgctgactacactgtagaggaaatccctgctaatctagttgacgaagctaacgaatggagagataagatgctcgaaaaggtggcagagtttgacgatgctttgatggagaaatatttcgatgatccttctactattacagaagaagaagtgctgagagctcttcgtaatgctactgtacagatggctgtggttccgatgttgtgtggttcttcattcaagaataaaggtgtacagacactgcttgactatgtttgcgcattcttgccttctccattggatactgaaaatgtagttggaacaaatcctgagacaggtgctgaggaagatcgtaagcccagcgatgatgaaaagacttctgcattggcatttaagattgctactgacccgtatgtaggtcgtttgacattcttccgtgtttactctggtaagattgaagcaggttcttatatctataattctcgttctggtaaaaaagaacgtgtatctcgtctgttccagatgcactcaaacaagcagaatccggttgaagtaatcggtgctggtgatattggtgcaggtgttggatttaaggatattcatacaggtgatacattgtgtgatgaaaatgccccgattgtattggagtctatggatttcccggaaccggttattggtattgctgtagaaccgaagactcagaaggatatggacaaactgtctaacggtttggctaaattggctgaagaagatccgacgtttactgtgaagactgacgaacaaactggtcagactgttatctctggtatgggtgagcttcacttggatatcattattgaccgtctgaaacgtgagtttaaagtagaatgtaatcagggtaaacctcaggtaaattacaaagaggctatcacgaagacagttaatttgcgtgaagtttataagaaacaatctggtggacgtggtaaatttgcggatattatcgtaaatattggtcctgtagatgaagactttactcaaggcggcttgcagtttatagatgaagtgaaaggtggtaatattcctaaagaatttattccgtctgttcagaaaggctttactactgcaatgaagaatggtgtgttggctggttatcctttggattcactgaaggttactttgcttgatggttctttccaccctgttgactctgatcagttatcattcgaaatctgtgctatccaggcatataaaagtgcctgtgctaaggcaggtcctgtgcttatggagcctattatgaaactggaagttgtaactccggaagaaaacatgggtgatgtaatcggtgacttgaataagcgccgtggtcaggttgaaggtatggaatccagtcgttcaggtgctcgtatcgtgaaggcaatggttccgttggcagaaatgtttggttatgtaacagcattacgtacaatcacttctggtcgagctacttcatcaatggtttattctcatcatgctcaagtttctaactctattgctaaggcagtgttggaagaggtcaaagggcgtgttgatttgatctaaaaatgttaaagtccgtaggctagcgaatgactcttagcctacggaattttatcttattataatattaataattaatcaaactaatgagtcagaaaattagaattaaattgaaatcttacgaccacaacttggttgacaaatcagctgagaagattgtaagaacggtgaaggcaacgggtgctatcgttagcggtccgattcctctccctacgcataagcgtatttttaccgtgaaccgttcgactttcgttaataagaagtcacgtgaacaatttgaactctcttcttataagagattgatcgacatctatagctcaacagctaagactgtagatgctctgatgaagttggagttaccgagtggtgtggaagtagaaatcaaagtttagtatttaaattttaagtgaaatgccaggattattaggaaaaaaaatcggaatgacatccgttttcagtgccgagggtaagaatgtaccatgcactgttatcgaagcaggtccttgtgttgttactcaagttaagagtgtcgaaaaagatggctatgcagctgttcagttgggcttccaggataagaaggagaagcatacgactaaaccgttgatgggtcactttaagaaggctggagtaactcccaagaaacacttggctgagttcaaagaatttgaaacagagttaaatctgggtgatactgttaccgtagaattgttcaatgatgtaacgttcgttgatgttatcggaacttctaaaggtaagggttttcaaggtgtagttaaaagacatggttttggtggtgtaggtcaggctacgcacggtcaacacaaccgtgctcgtaagccgggttctatcggtgcctgttcataccctgcaaaagtattcaaaggaatgcgtatgggtggtcaacttggcggcgacagagtgactgttcaaaacttacaggtattaaaggttcttccggatcacaaccttcttttgattaagggttctgttcccggttgcaaaggttcaatcgtaataattgaaaaataatggaagttaacgtatataacattaaaggtgaagacactgggagaaagattacgttaaacgagtctatcttcggaattgagcccaacgaccatgctatctatttagacgtaaaacaatttatggctaatcagcgtcagggtacacacaaatcaaaagaaagaagtgagataagtggttctactcgtaaaatcggtcgtcagaaaggcggtggtggtgcacgtcgtggtgatatgaattcaccggtacttgttggtggtgctcgtgttttcggtcctaaacctagagattactacttcaagttgaataaaaaagtaaagacattagctcgtaagtcagctttggcatataaagctcagaacaatgcagttgttattgtagaagactttaattttgaagctccgaaaacgaaagattttgttgctatgacaaaaaatcttaaagtttctgacaaaaagctgcttgtgattttaccagaagcaaataaaaacgtatatttgtcggctcgtaatgtggaaagtgcaaatgtacagacagtctcaggattaaatacttacagagtattgaatgctggggttgttgtgtttactgaaagcgctctttcggctattgacaatatcttaatgtaaaaaggaggcttaaataatgggaattattattaaaccgttagtaacagagaaaatgacagcaattactgataaggcgaacaaccgtttcggctttattgtgcgtcctgatgctaacaaactggaaattaagagtgaagttgaagccttatataacgttacggtagttgatgtgaatacggttaagtatgcaggcaaaaataaaagccgttatacaaaagctggtatcatcaatggtcgtacgagtgcttataaaaaagcaatcgttacgttgaaagaaggagatactattgatttttatagcaatatttaaaagaaatggcagtacgtaaatttaagcccacaacaccggggcaaagacataaaattattggtacctttgaggaaattactgcgcgggtaccagaaaaatctcttgtttatggcaagaagtcttcaggtggtcgtaacagcgaaggtaagatgactatgcgctacatcggtggtggtcataagaagattatcagaattgtagatttcaagagaaataaggacggtgtgcctgcagtggttaaaacaatagaatatgacccgaatcgttcggctcgtattgctttgttgttttatgcagatggagaaaaaagatatataattgctcccaatggattgcaagtcggtgcgactttgatgtcaggtgaaaatgcagctccggaaatcggtaatgcacttcctcttcagaatattccggttggtactgtaattcataacattgaattacggccgggtcaaggcgctgctttggttcgttcggctggtaattttgctcagttaacttcaagagaaggtaaatattgtgttatcaagttgccttcaggtgaggttagacaaatacttagcacttgtaaagctactatcggtagtgttggtaattcagatcatggattggaaagttcaggtaaagctggacgttctcgttggatgggccgtcgcccacgtaaccgtggtgttgtgatgaacccggttgatcacccaatgggtggtggtgaaggacgtgcttcaggaggacacccaagatctcgtaagggattgtatgctaagggacttaagactagagctccgaagaaacaatcgtctaagtatattattgagagaagaaagaagtaatctgattaattgagtaaactatgagtcgttcattaaaaaaaggtccgtatattaacgttaagcttgagaagaaagttcttgctatgaatgaatcaggcaagaaaattgttgttaagacttgggccagagcttcaatgatttcgcctgatttcgtaggccatacagttgcagttcataacggaaataaatttattcctgtatacgttaccgaaaatatggtagggcacaagttgggcgaatttgctccaactcgtactttcagaggacacgctggtaataagaaaaaataacaggatttatctgaaataataaagtataaatataatgggagcaagaaaaaaaatatcggctgaaaaaagaaaagaagcccttaagaccatgtattttgcaaagttgcagaatgttcctacttcccctcgcaaaatgcgtctcgtggctgacatgattcgcgggatggaagtgaatagagcacttggcgttttgaagttttcttcaaaagaagcagctgccagagttgagaaattactgcgctctgcaattgctaactgggagcagaaaaacgaacgtaaagctgaaagtggcgaattatttgtaacgaagatttttgttgatggtggtgctacactcaaaagaatgagaccggctccgcagggtagaggttacagaattcgtaagcgttcaaatcacgtaacgttgttcgttggttctaaaagtaataacgaagatcaaaattaaggtaaatgggacaaaaagttaatccaataagcaaccgtttaggaatcatcagaggatgggattccaattggtatggtggaaataattacggcgattctctgctggaagatagcaagattcgtaaatatttgaacgctagacttgcaaaagccagtgtttcaagaatcgtaattgaacgtacactgaaactcgtgactattaccgtttgtactgcacgtccgggtattattatcggtaaaggtggccaagaagttgataagttgaaagaagagttgaagaaggttaccgataaggatattcagatcaatatctttgaagtgaaaagacctgagttggatgctgttatagttgcaaacaacatcgctcgtcaggtagagggaaagattgcctatcgccgtgccataaaaatggctatcgctaatacaatgcgtatgggtgctgaaggtatcaaaattcagatttcaggacgtttgaatggagctgaaatggctcgttctgaaatgtataaggaaggaagaactccgttgcacactttcagagcagatatcgactactgtcatgcagaagcattgactaaggttggtcttctcggtattaaagtttggatctgtagaggtgaagttttcggtaagagagaattagctccaaactttacgcaaagcaaagaaagcggtcgtggaagcaatagcggaaacaatggcggaaagaacttcaaaagaaagaaaaataatcgctaaacgaatttgaatttttaggaattatgttacaaccgaaaaagacaaaattcagaagacaacaaaaaggccgtcaaaaaggtattgcccaaagaggtaatcagttggctttcggttcttttggaattaaggctttggaaacaaaatggattacaggccgtcagatcgaagctgctcgtattgcagtgacaagatatatgcaacgtcaaggacaaatttggattcgtattttcccggataagcctattaccagaaaacctgctgatgtacgtatgggtaaaggtaaaggtgctccagagggctttgttgcccctgttactccgggaagaattattatcgaagccgaaggggtatcttatgaaatcgcaaaagaagctttgcgcttagctgcacagaagcttcctattacaactaagtttgttgtaagacgtgattatgatattcaaaatcaaaatgcgtaagggatatgaaaatagcagaaataaaagaaatacctaccaatgatttggtagaaagagtagaggcagaagtgacaaactataatcaaatggttttaaatcattctatttctcctttggacaatcctgctcagatcaaacaattacgcaggactattgcgcgtatgaaaactgaattacgccaaagagaacttaacaataaatgatgagcttgatggaagcaagaaatttaagaaaagaaagaactggggttgtgctgagcaataaaatggagaagaccattacagtagcagctaagtttaaagagaaacaccccatatatggtaagttcgttagcaagactaagaagtaccatgctcatgatgaaaaaaatgagtgcaatatcggtgatactgtacttattatggagactcgtcctttgagcaagactaaaagatggagattggtagaaataattgaaagagctaagtaattatgatacaagtagaatccagaattacagtatgtgataacagcggagcaaaagaggctctctgtattcgcgttttgggcggtacgggtcgtcgttatgcttcagtgggggacgtgattgttgtttctgtaaagagcgtcattccttcaagtgatattaaaaaaggtgcagtgtctaaagctttgatcgtacgtactaagaaagaaatccgtcgtcccgatggttcttatatacgttttgatgataatgcttgcgtattgttgaacaatgcaggcgagattagaggtagtcgtattttcggtccggtagctcgtgaacttcgtgctaccaacatgaaagttgtgtcactcgctcctgaagtactttaattttgtaaaagatttaagtaatgagtaaattacatattaaaaaaggcgatacagtttacgtaaatgctggtgaagacaaaggcaaaactggtcgtgtgttgaaggttcttgttgataaaaatcgtgcaattgttgaaggtgtcaacatggtgtccaagagcactaagcctaatgcaaagaaccctcagggtggtattgtgaagcaggaagcttctatccatttgtctaacttgaatcccgtagatcctaagacgggtaaagctacgcgtatcagtcgtaaagtaactattggtgaaaacggtaagaagactattgtacgtgtttctaaaaaatcaggagaggagattaagtaatgagtaatactgcaagccttaagaaagaatatgtagagcgtattgcgcctgcattgaaatcacagttccagtatacttcttcgatgcaggtacccgtacttaagaagattgttatcaatcagggtttgggtatggctgttgctgataagaagattatcgaagtggcaattaatgaaatgactgctatcacaggtcagaaagctgttgcaaccatttctcgtaaagatatcgctaactttaagttgcgtaagaaaatgccgattggtgttatggtaactttgcgtcgtgagagaatgtacgaatttcttgagaaattggttcgtgtagctcttccccgtatccgtgacttcaagggtattgaaagtaagtttgatggaaagggtaactatactcttggtattcaggaacaaatcattttccctgaaattaatatcgatagtattaccagaattctcggaatgaatattacctttgtaacctctgcacaaacagatgaagaaggttatgccttgttgaaagaattcggtttaccgtttaaaaacgctaaaaaagattgataatatggcaaaggaatcaatgaaagcacgtgaagtaagacgtgctaaattagtagccaaatatgccgagaagagagctgcattgaagcaaattgttagaacaggtgatcttgctgaagcttttgaagctgcacagaaattgcaggaactgcctaaaaattctaatccgattcgtatgcacaaccgttgtaagttgactggtcgtcctaaaggatatatccgtcaattcggtatctctagaattcaattccgtgagatggcttctaacggtcttattcccggtattaagaaagcaagctggtaatttttgttttaaatattgtcagggtaggcctgattaatttaattttttattatatgactgatccaatagcagattatttgacgaggttgcggaacgctattcaagcaaagcacagagttgtagaagttcccgcttcaaatttgaaaaaagaaatcactaagattctttttgagaaaggctacattcttaattataagtttgtagaagatggtcctcaaggtacaattaaggttgccttgaagtatgatccggttaacaaagtaaacgcgattaagaaattggaaagaatctcttctccaggtttgcgtcagtataccggttacaaggacatgccgcgagttattaatggtttgggtattgctataatatctacttccaaaggtgtaatgaccaacaaagaagccgctgaactgaaaattggtggtgaagttttgtgttatgtatattaataggaggaattagcaatgtcaagaataggaaaattacccattagtattcccgctggagtaacagttactctgaaagaaaatgtggttaccgtgaagggacccaaaggcgaacttagccaatatgtagatcctgctatcaatgttgccatcgaagatggtcatgtgactttgagtgagaatgaaaatgcaatgttggataattccaaacaaaagcatgcattccatggtttgtaccgctctttagttcacaacatggttgttggtgtatctgaaggatataaaaaagaattggaacttgtaggtgtgggttatcgtgcttctaatcaaggcaatattattgagttgtctttgggttatacgcatagtatcttcatacagttgcctcctgaagttaaggtagagacaaaatctgaaagaaataagaatcctcttattattttagagtcttgcgataaacaattgctgggtcaagtttgctctaagatacgttctttccgtaagcccgaaccgtataaaggtaaaggtgttaagtttgttggtgaagaaattcgtagaaagtctggtaaatctgccggcgctaagtaatttacataaaataagaatgttatgacaacaaaaatagaaagacgaattaaaatcaaatatagagtacgcaataaaatttcaggtactgctgaacgtccgcgtatgagtgtatttagaagtaataagcaaatctacgtccaacttatcgacgatttaagtggtaagactttggctgcttcttcttctctgggtataacagagaagttgccgaagaaagaacaagctgcaaaggttggagagttgatcgctaaaaaagctcaggaagcaggtattactactgttgttttcgaccgtaatggttacttgtatcatgggagagtaaaagaagtagctgatgctgctcgtaacggtggacttaaattttaatcattatggcaattaataatagagttaagattacaaacgatatagaactgaaagaccgtttggttgctattaatcgtgtaaccaaagtaaccaaaggtggtagaacttttagtttctctgcaattgttgttgtaggtaacgaagaaggcatcatcggttggggtcttggtaaagctggtgaagttaccgcagctatcgctaagggtgttgaatcagctaagaagaatctgacgaaagtacctgtactgaagggtactgttcctcacgaacagtccgctaagtttggtggcgcggaagtattcatcaagcctgcttctcatggtacaggtgtagttgccggtggtgcaatgcgtgcagtacttgaaagtgttggtattacggacgttttggctaagtcaaaaggatcttctaacccacacaacttggtgaaggctactatcctggcgttgggtgaaatgcgtgacgcacgtatggttgctcaaaacagaggaattagtattgaaaaagtatttagaggataaggaggaatatatgtcgactataaagattaaacaagttaaaagtagaattggtgctccggctgatcagaaaagaactctcgatgcactgggacttcgtaagttgaatcgtgtggttgaacacgagtgtactccttcaattcttggaatggtggataaggttaaacacttggttaccattgttaagtaattatttgttgaatataaaacgaattacaatatgaacttaagtaatttaaaacctgcagaaggatctactaaaacaagaaaaagaattggacgcggtccgggttctggcttgggaggtacttctaccagaggtcataagggagctaaatcaagatctggttattctaagaagatcggttttgaaggtggtcagatgcctcttcaacgtcgtgttcctaaattcggttttaagaacattaatcgtgtagaatataaggctatcaacttggatacaattcagaaacttgctgaagctaagaagttggaatcagttggaattaatgactttatcgctgctggttttatttcttcaaatcagttggtgaaggtattaggtaatggaactttgactacaaagttggatgtgcaagctcatgcattctctaagactgctgttgctgccattgaagctgctggtggaagtgtagtaaaactctaattcgatgagaaaagctattgaaacattaaagaatatatggaaaattgaggatctgagacaacggatcctcattaccatattgtttgtggcaatctaccgttttggttcgtacgtcgtactgcctggtattaatccggctatgctgacacaattgcatcaacaaacaagcgagggcctcttagccttattaaacatgttttcgggaggagcattctctaatgcatctatttttgcattaggaattatgccttatatctctgcttcaatcgttattcagttgttggggattgcggttccgtatttccagaaacttcaacgtgaaggtgagagtggtagaagaaaaatgaaccagtatactcgttatttgacgattattattttgttggttcaggctccttcttatttgctcaatcttaaaatgcaggccggtccttccttaaatgcttcattagattggactctgttcatgattacctctaccattatcttggcagctggtagtatgtttattttgtggcttggtgagagaatcactgataagggtatcggtaatggtatttcatttatcatcttaatcggtattattgcccgtttgcctcagtctttattccaggaattaatttcccgtatgactgataagacaggtggtttggttatgttcttaattgaaatcgtattcctgttgctggtaattgctgctgcaattttgttggtgcaaggtacaagaaaaattcctgtacaatatgctaaaagaattgtaggtaacaaacaatatggtggtgcaagacaatacattcctttgaaagtgaatgcagctggtgtaatgcctatcatctttgctcaggcaattatgtttatccctatcacctttattggtttttcaaatgtagatcatgtgagcggttttgtacgtgcatttactgatcatacaagcttctggtataatttcgtatttgcaataatgattatactgtttacgtatttttatactgcaattacgattaacccaactcagatggctgaggatatgaagaggaataatggtttcattccgggtatcaagccgggaaagaagacagccgaatatatcgatgatattatgtctcgtataacattgcctggctctttcttcttggctttggtagctattatgccagcgtttgccggtatttttggtgtgaaagctgaatttgctcaattcttcggcggtacatctttgttaattcttgtaggtgtggttcttgatacactccagcagattgaaagtcacttgttgatgagacattatgacggtctgttgaaatctggtcgtattaaaggacgtagtaatgtagctgcatattaatctttttataagatgatatttcttaaaacggaagatgaaatagagctgctccgtgagagtaatttgcttgtcgggaggacattggctgaagttgcaaaactggtaaagccgggagttactacaaaggaactggataaagtagcggaagagtttatcagagatcatggtgctgttcctactttcaaaggttttccaaatcaatatggtgatccatttccagcttcgttgtgtacatcgataaatgaacaggtggtacatggcattcctggagatatagtactaaaagaaggtgatattgtatcggttgattgtggtacttatatgaatgggttttgtggtgattctgcctatacattttgtgtaggggaagtagatgaggaagttcgcaaattactgaaggttactaaagaggcattatacatcggaatagaaaatgccgttcaaggaaaacggttgggtgatatcggatatgcaatacaagaacattgtgagtccaattcattcggtgtagtgcgtgagtttgttggtcatggtataggtaaagaaatgcatgaagaccctcaggtccctaattatggaaaacgtggttatggaactatgttaaagaaaggtctttgtattgctattgaaccaatgattacgcaagggagtcgccaaatagtaatggagcgtgatggttggacggtgagaactaaagattggaagtatgcagctcattttgagcatacagtggctgttggagctggcaaagctgatatcttatcatcgtttgagttcatagaagaagtattaggagataaagcaatttaaaaaaataatatggctaagcaatctgcaatagaacaagatggagttattgttgaagcattgtctaatgcaatgtttcgtgttgaattagaaaacggacatgagattactgcacatatttccggtaagatgcgaatgcattacattaaaatcctgccgggggataaagtaagagtcgaaatgtctccttacgatttatcgaaaggaagaattgtatttagatataaataaaattaagatatgaaagtaagagcatctttaaagaaacgtacgccagaatgtaagatcgttagacgcaatggccgtttgtatgttattaacaagaaaaatcctaagtataaacaacgtcaaggataatattattatttttgcaaaaaaaataatttagtatatggctataagaatagttggtgtcgatttgcctcaaaataaaagaggtgaagttgcgttgacctatatctatggaataggtcgtagtagttcagcaaagattttagataaagctggtgtagataaagacctgaaggtaaaagactggacggatgatcaagctgccaagattcgtgagatcattggtgcagaatttaaagtagaaggtgatcttcgctcggaagttcaattgaacatcaaacgtttgatggatattggttgttaccgtggtgtacgtcatcgtatcggtttgcctgtaagaggacagagcacaaagaataatgctcgtactcgtaagggtagaaagaaaaccgttgcaaataagaaaaaagctactaaataataattgttgatatggcaaaaaaaacagttgcagcaaagaagagaaatgtgaaagttgacgctaatggacagttgcatgttcattcatctttcaacaatattattgtttctcttgcaaacagtgaagggcagattatttcttggtcatctgctggtaaaatgggatttagaggttctaagaagaacactccttatgcagcacagatggctgcccaggattgtgcaaagatagcatttgatcttggcctgagaaaggtaaaagcatatgtgaagggcccaggtaacggacgtgagtctgctattagaactattcacggtgcaggtatcgaagttactgaaatcgttgatgtaactccgcttccacataatggttgtcgtcctccgaaaagacgtagagtttaagatttacctttaataaaaatgatcttgattttgtttttggattacattaatttctctctgtaatcgcggctgcaacaaattaagttcatgaataaaacaattaaaatttaaaagaaatggctagatatactggaccaaaatcaagaatagcccgtaaattcggtgaaggtatcttcggagcagataaagtattgtcaaagaagaactatcctcccggacaacacggtaattccagaaaaagaaaaacttctgagtatggtgttcaacttcgtgagaaacagaaggccaaatacacctatggagttttagagaaacaattccgcaacctatttgaaaaggcagaaacagctaaaggtattactggtgaaattctgcttcagttgctcgaaggtcgtcttgataacattgtattccgtttaggtattgctcctactcgtgcagctgctcgtcagttggtggggcacaagcatattactgtggatggtgaagtggtaaatataccttcatttgcagtaaaaccgggtcaggtaattggtgttcgtgaaagatctaagtctttggaagtaattgctaattcactggctggctttaaccacagcaaatatccttggttggaatgggatgataactctaaggttggtaaattgttgcatgtacctgaaagagcagacattcctgaaaacattaaagagcatttgatcgtagaattgtattctaaataaaataattaatttcatggcgatattagcatttcaaaaacctgataaagtattaatgttggaagcggattctagattcggtaaattcgaatttcgtccgttggagcccggttttggtattaccgttggtaatgcactacgccgcatcctgctttcgtcattagagggttttgctatcactactatcaaaatagatggtgttgagcatgagttctctagcgtaccgggagttaaagaggatgttactaacattatcttgaatctgaaacaggtgagattcaagcaagtagttgaagaattcgaaagtgagaaagtaagtattacaatcgaaaattctagtgaatttaaagcaggtgacataggtaagtatttgactggatttgaagtgttaaatcctgaattagttatttgtcatttagattctaaagcaactatgcaaatcgatattacgattaacaaaggtcgtggatatgttccggctgatgaaaaccgcgaatattgcacggatgttaacgtaattcctatcgattccatttatacaccgatacgtaatgtgaagtatcagattgaaccgttccgtgttgaacaaaagacggactacgacaaattggtacttgagattactaccgacggttctattcatccgaaggaagcgctgaaagaagctgcaaagattctgatttatcacttcatgctcttctctgatgagaagatcacattggaaagcaatgatgtggatggcaatgaagaatttgatgaagaagtattgcacatgcgtcaattgttgaagactaaacttgttgatatggacttatcggttcgtgccctcaactgcttgaaggctgccgatgtagaaacattgggtgatttggtacaattcaataagacggatttgctgaaattcagaaacttcggaaagaaatcgcttactgagcttgatgatttgctggaaagtctgaatctttcgtttggaaccgatatttctaaatataaattagataaagaataaaaaatgagacataataagaaattcaatcatttaggtcgtactgcttctcacagaaatgcgatgttatctaacatggcatgttctttgattaagcacaaaagaatcactacgactgttgcaaaggctaaagctctgaagaagtttgttgagcctttgattacaaagtcaaaggatgacacgactaactctcgtcgtgttgtattcagcaatctgcaagacaagcaagttgtaacggaactgttcaaggaaatctctgtgaagattgctgaccgtccgggtggttatactcgtatcatcaagacagggcaccgtctaggtgacaacgctgaaatgtgctttattgaactcgttgattacaacgaaaacatggctaaggaaaaggttgctaagaaagctactcgtacccgccgttctaagaaagctactactgaagctgctgctccggcagaagctccggttgctgaagcaccggcagttgaagaggcaaaagcggaagaagctaaagctgaataaatcgactattcttttcaatataaaagccgtctcttgtgaaaggggcggctttttttctttgcattcggatattttgggaggaaagaagatatatctttcctaaacattcattaaaaggttctactattaaacaattaaatgaaacaaactgttatctttgcagatagatatggcaaagtttctgaaggtgatattattcctagtccttgctactgccttttgtggaagtgtgagtgatgtatttaccgtacagacggtagatgaaatggttattgccacccaagttagtttaggagaagaggggaatacacagcgaaatgatgttcggcaaggaagttatattccggctccgaaattgccatatttgtcagatgcagaacttgcaggttccgctggaactactcagttgctcaccttttcacgtgcgcaacgttcgtatacaacagaatatatcctttcgttaaaagacatgatagagcggctggctcatcgtgacgatgtactgtcattgcatcgctcgaagttatttgataccagcacctcttatcgctgccaccctgcgtgtgaatattatgtatttacgctcaggcgaattatcatttagacgtttgaatgaattcagatttttttgccttatgtggtcatagactgtacgaggtgattattggtatgttttatcagttaaatttttattcattttaaacgatttaaattatggcaactcaagcaattgacgcaactatttttgcgtctacacaccccgatatcgcaaaacgcacaagtgtctccggactaattttttcagtggcaatgctgctgttaggtatccttatattcgcatcaacttttgaagtaactgaccgctcatctacgcttagtatgttgttgatggtgttaggtacggcatttttcctcttaggaatattccgtttgttctggaaatctaaagaagtggtatatattccgacaggaagtattactaaggaacgcagtgtgttcttcgatttgaaacacatgggtaagttgaaagagatgattgaaaaaggccagctttctattgaagaaggtgtaaagagtgaaggaagcggtaatgtacgtttggatgttatactttctcaagataataaatttgcagccgttcagttgttccagtttgtgccttatacatacactccggtaacctctgtacattattatacagggaacgacgcagcaaccatatcggctttcttggcgaagtgtaaagtgaactaaccctcagggtttctggacttaactttaaagttatggggatcagtcggtaacggctatccccatttttttcatcaagaaacaggcattcatattctgagctactccttcgcgcagacgataagaaaaagtcagttcattatctgtgatgtcggcctcgaatcggtaattacggatgtcatcaggataaatgtcggcaagcgtgccgagcatcaggtcgtgagtagcgatgataccatttgcctgtaaagtcatgaattgcttgataagggcaagcgaacctttctgtttatccatggagttggttccttttagaatctcatcaaggatgatgaaaagctcttcaccggcttgcagtttgtcgatgataagtttcagacgtttcagttctgcaaagaagtaggattcgttatcattcagggagtcgctggtgcgcagactggtgatgagctgaactggatacagttccatactccgggcgcaaacgggggtaccgatgcaagccagcaaatagttgatgcctaccgtacgaagatacgtacttttgcctgccatatttgctccggtgataataatgaagaaaggacgtttttctatatcaatgtcattgcgtacacatttgtcgcggttcatcagtggatgtcccatagatgcggcgcggagactgaaagactgggtggtaataatagggtaggagtaatccggatgattataggcgaatgtggctagtgaacacagagcatccatgtgagcgatagctgtcagccagcgtggcagttcagaagcatattgctctttccatccttcaatctgtatgattttgcggatttcccagaagaataatccgttgagggtggcatatatgtaggcgttgtttcgctgatcgagttcgttcataagcttgcttagacgctggatggagtgggaagccgtttgtttttcatcaccgatccactctctcacttccttcaatatcggacttttcatgggttggttctctataagtcggagcagattggcatacgttgctaatatctgtagcttctttccgtagacagcttgcattttagtgattttactagtgaaacaaaagctggcaaaaacaaagcataaccatagaataccgaaaacagtgagcggaataatgcctgcaatagccaatgctatacataagatatttattccacccgccaatagcggtagcatgcgaaagaaaacattcttccggaagacactgggactcttagcccatgcctttaattcatcttcatcagcagcttttcctttatagagcagtcccagaatacggaattcttgtcgaaagttcaattccgatgtcagttcgcgaatggcttcctgtcgggattctatctctttcttatttaccagatgcgtgcccagccaattggctaacaagctttttccaagttgcgtacaggtacggtttatatactgaaaaagagaatgtggaccaaacacatccaggtcataactgtacaggtgtgccggatcgataaattctgctccgtcttcaaaagaagatgtgtcatagttcagcgccgaaagttcttgctcattgattgctatctttttttccagataatctttccggtgaaacagccggttgtgatactttatcaataggataaaaggcagaagtgtaacggcaatgatccccgttaatactatccagcctgatgaccagaaatatataattcccgcaattcctgcaacaaataacaataatcgcagtgagcctatgcggtaaatcttgttttgtactttatttaattccgaacgtccttcttcagcgatgcgctgataagtggcggttatttcattgattgtgttcattctattgtttctttgccgcaaaggtaaaataagcctgctttataaccaaatgcttcatctgctttctcttgctctaatgaagaacttagcatccatatttatgtttcctttaagagaagcgtttgtttctcagtgtgaaactgtctgtttctcggtgtgaaactgcttgtttcaaagcatgaaacagacagtttcaaggcatgaaacttgcagttccaagtgatgaaactattcttatccatcgaggtcgtaagttttcgccttagatatccctttgatgagtattgcttatttttccagttactcgcagctttgaagcgtattatgcagtatagagataagcccaagtataaatatgcatgaacataaatctgccgaaattgcatttttcttttcaataatttgctcttcttggataaataatgtaactttcgctcagataaaactgttttagaaagaaaagcttggggtatgaaaaggtggtggttattaggcatattcggattattggttgctttgcatgggagcgcccagcaagtgatatatgccaatttgaaggaactggtggaagatcgtggcgacacactctccacattgaagatagagaagcgctccaagaatcagattttactgatgggaggtgctgactatcgcgtctcggtagatgacaatcccggtctctgccgatatttgaaatcccgttgttatgcggtgagggctgactcggcgttatacgtcaactgtaagaaagtgcgttataaacgtttccgtttcggcggttggtatgcccctgccacttggatacaggggaaaatttatttctacgcacagcctgtaggttctgtggcggcaagtaccacacagcctgccgacgctacgaagctgggtggagatgtcggtacggccattgccgcttcggggctggttaatgcgcgggtttattatgaactgaatccggaaacgggtaaagtagagttcgtaggaaaagacaaaatgatacagctactaaaaaatgagccggaacttctgaacgccttcttacaggaaagcagtgaaagtgcggaagttacaggtaaatacttactacgcttaaaatgactaaatgataaataaatcccggtatcacttgttgatatcgggatttatttctatattgcggcagcttacagaagtaaactgatgacattttgtaacctttcatcctgcatgttatggaaataaccttaagtaacacattgcccccttaccccactttcgtagagggtatccggagggctcccgaccgtggcttcacactttcgcccgcacaaactgccacggcgttaaagaatgcattgcgttatatccccaaagaattacacgagaccctcgctccggagtttatggaagaacttcgtacccgcgggcgtatctatggctacagatatcgtccgcaaggcgacctcaaagcgaaacctatcgatgcttacaaaggaaattgcattgaaggcaaggctttccaggtgatgattgacaataatctctgcttcgacattgccctctatccttatgaattagtcacttatggcgaaacgggacaggtctgtcaaaactggatgcagtatcgtctcattaaacagtatcttgaagtgctgactcaagatcagacactcgttattgaaagtggacatccgctgggattattccgttctaagcccgatgcaccacgcgtgattattacgaatgccatgatggtaggtctttacgataatcagaaggattggcacgtggccatgcaaatgggagttgccaactacggtcagatgactgccggaggctggatgtacattggtcctcaaggtattgtgcatggcactttcaatactctgctgaatgccggacgtatgaaactcggtattcctcagaacggtgatttgcgcggacatctgtttatatcttccggtttgggcggcatgagcggtgcccagcctaaggccgccgagatgtcgggtgcagcttccattatagccgaggtagatatgtcacgtattgaaacccggcatcggcaaggttgggtagggcatgtcacggattctattcccgaagcattctcgctggcgcatgaggcgatggatggcaagaaaccgatttctattgcttatcatgggaatattgttgacctgctggaatatgctgtaaaccaaactatacatatagacctgctttctgaccagacttcctgccatgccgtttacgaaggcggatactgtccggcgggaattactttcgccgaacgcacaagtctgttgcacgaagacccgcagaaattctgtggactggtgaatgaatcgttggcacgccatttccgggctataaaagcccttgtagagcagggtacctatttcttcgattatggaaactcctttatgaaagctgtttatgatgccggagttcgtgagattgccaaagaagaagatgataagaatggatttatattccccagttatgtagaagatattatggggccggaactttttgattacggttacggacctttccgctgggtatgtctcagtggtaaacatgaagatttgataaagaccgatcatgcagcgatggaatgtattgatccgaatcgtcgcggtcaggatctggataactacaattggatacgcgatgcggaaaagaataatcttgtggtaggtacacaggcgcgtattctttatcaggatgcagtagggcgtatgaagatagcgttgaagttcaacgaaatggtacgcaatggtgaagtagggcctattatgttgggacgcgatcatcacgatgtgagcggtacggactctcctttccgtgaaacttctaatataaaagatggaagcaatgtcatggcggatatggccgtgcaatgctttgccggaaactgtgcccggggaatgagcctcgtagcactgcacaatggtggtggcgtgggtattggaaaagccataaatggcggcttcggtatggtatgcgatggtagtgagcgggtggatgaaatactttgttcagctatgttgtgggacgtgatgggcggtgtggcccggcgttcatgggcacgcaatgggcatgctatggagacgagtgaagagtttaatcggacacatgccgatggttatcatattacgatgccatacgtggctgatgacgaattagtaaataaatacatatcataaaaagagaatcatgaataaaatcatcgaatgtgtccccaacttcagtgagggacgtgacttgcagaaaatagatcaaatcatatcccctttccgtggtaaacaaggtgtaaaactcttggattacagtaacgatgaagaccacaatcgtctggtagtaaccgtggtaggagaaccggaaccccttcgtgatgccgttctcgaagctatcggcattgctgtaaagcttattgaccttaaccaccacaccgggcaacatccccgtatgggtgccgtagatgtagttcctttcattcccatcaagaatgtgacgatggaagaagctatcgccctttccaaagaagtaggtgcagaggtaggcaaacgctataatcttcctgtctttctctatgagaaatccgcatccgctccgcatcgcgaaaatcttgctgccgtgcgtaaaggtgagttcgaaggtatggcagaaaagataaagctacccgaatggcagcccgactttggtcctgccgaacgtcatgccactgccggaaccgttgctatcggtgcccgcatgccgttggtagcctacaatatcaatctgaatacacctaatctggatatcgcacatgatattgccaagaagattcgtttcattggcggtggcctgcgttattgcaaagcaatgggagtagagttgaaagaccggggcattactcaggtctccatcaatatgacagactatacccgtaccgccctttaccgcgcttttgaactgacccgtgtagaagcacgtcgctatggggtcagcatcgtggggagtgagattatcggccttgttccgatggaggcgctcattgatacagcttcttattatctaggtttagagaatttctctatgcaacaagtgcttgaggcgaggattatggaagaataatagaatgataaaagaacgcaaattacgcaaattacacaaataaagtttttaaatatgaccgagaacctgataattttcaatgcccgcgttgtaacccccatcggcttttccgcccgttgtggcaaagagatgggtgaactatgcatcattgataatgctacaatagaagtaaccgacggtatcatttcctatgtcggtccttcccggggcgagatgcgtgacggatattatcaacgctactggcactacaatgctcgtggcaaatgcctgttacccggcttcgtcgattcgcatactcactttgtatttggtggcgaacgtgccgaagagttctcctggcgattgaaaggagaaagctatatgtctatcatggagcgtggtggtggcattgtaagcactgtaaaggccacccgcgaatgtagttttattcaactccgctccaaagccgaaggttttttgaagcaaatgagtaatatgggggttactaccgtagaaggcaagagcggctacggactggataaggaaacggagcttctgcaactcaaagtcatgcgtagcctgaataatgacgagcataagcgggtagatattgtatccacttttctgggtgcgcatgccgtacccgaggaatataagggacgtacggacgaataccttgatttcattatcagtgacgtcttgccttgcgttgccaaaaacgaactggccgagttttgtgatgtcttctgcgaacaaggcgttttctccgtcgagcaatcccgccgtctgttgcaggctgccaaggaatatggtctgggcttgaaactccatgccgatgaaatcgttccgctgggaggtgccgaactggctgccgagctttctgctgtttccgcagatcatctgttgcatgcatccgatgctggtatctgcgccatgcgggatgccggaacggttgcaactttactccctcttactgcttttgccctgaaagaaccttatgcacgcggtcgcgaaatgattgattccggttgtgccgtagcccttgccacagatctcaatccgggcagttgtttctccggttccattccgttgacttttgctctggcgtgcatctatatgcgtcttactattgaagaagctatcaccgcccttaccctgaacggggctgctgccttgaaccgggcggacagtatcggtagcatcgaagtaggcaagaagggagattttgtagtgctgaattccgataattaccatttcctgccttattatgtcggtatgaattgtgtaaataccaccatcaaagaaggagtgatttatcctgtattgtaaaacctttaaagaaaaataccatgttagttgatttaacagtaaaagaattcttgaataaagtggcgggcagtgatcccgtccccggtggcggaagcattgctgccctgaacggtgccgtagcttcggcacttgccgctatggttgctaacctcaccatcggcaagaagaattacgaagaacacgaggaacttatgaaccatattgcttctcttgcactgagagagaaagatgtatttatagctgatatagatcgtgactcggaagcctatgatgccgtgtttgcctgcttcaaaatgcccaaggctaccgatgaagaaaaagctgcccgcagcgctgctattcaggaagctactaagtatgccgctttagtccccatgcaagtagcccgtaatgcttacgagctgatgtcggtaattgccgacgttgcccgtttgggaaaccgtaatgcagtgactgatgcttgtgtggccatgatgtccgcccgtacagctgtactgggtgccttgctgaatgttcgcatcaacctgggttccatcaaagacaaaatctttgcagatgaactccaaagagaagccgatgtgctggaacgcctggcttgtgaccgtgaaaaagaagtattggatgttgttaaccaagaattacgagtatgaaaaacgtctatcatgtagggtccggtgaactcacattcgacatcatcgaacgaattatcaacgagaatctgaaactggaactggctcccgaagccaaagaacggatacagaaatgccgcgactacctcgaccataagatagccgagtccgaagaacctttgtacggtatcaccacaggcttcggttccctatgtagcaaaaatatatcccccggtgaactgggcactttgcaagaaaacctgattaagagtcatgcttgcagcgtcggtgaagaaatacgtcccgtcatcgtcaaactaatgatgctgctcaaagcccatgccctgtcgttgggacatagcggtgtgcaagtcattaccgtacagcgtatcctcgatttctttaacaacgatgtgatgcccattgtctacgaccgcggttcgctcggtgcatccggtgatctggctcctcttgccaatctcttcctgccgcttatcggtgtgggtgatgtttattataagggtaagaagcgcgaagccatcagtgtcctcgatgagtttggttgggaaccggtgaaacttatgagtaaagaaggtcttgccttgctcaacggtacgcagtttatgagtgccaatggtgtgtttgccattctgaaagccttccgcctttccaagaaagccgaccttattgccgctctttccctcgaagctttcgatgggcgtatcgatccttttatggattgtatccagcaaatccgtccgcatcggggacaaatcgagacaggcgataatttccgcaagctactggaaggaagtgaaatcattgctcaatacaaagcccatgtacaagatccgtactctttccgctgcattccccaagtacatggtgcaacgaaagatgctatccgttatgtttcttccgtcctgctgaccgaaatcaattccgtaacggacaatccaactatcttccccgatgaagaccgtatcatctccggcggaaatttccacggtcagccacttgccatttcttatgacttcctcggcatagcccttgccgaattaggtaacatttccgagcggcgtgtggcacagcttatcatgggactgcgtggtctgcctgaatttctggtagccaatcccggtttgaactccggttttatgataccacaatatgccgctgcatccatggttagccagaataagatgtattgctatgctgccagcagtgattccattgtttcctccaacggacaggaagatcatgtcagcatgggagctaatgcagctaccaaactataccgtataatggacaatctggaacacattctctccattgaattgatgaatgctgcacagggtatcgaattccgtcgccctctaaagacctctcccgctttggaacgcttcctgaatgaatatcgtaaagaagtcccttttattaaagacgacattgtcatgtacaaggaaattcataagacagtggcgtttctgaaccggacgaagttcgattattgacattcttcccaataaatctgccggaagtataataaacattaatatagttaatctttcaaaggaaactcaattggagaattgagttttctttctatatttgcccagttttattccgaaagtggacattcttctgcttgaaatctaaaaaattaaagagaaaatagaaatgaaaacgggcgacaatgtgaaagaacaccctcaaagattagagttacgggagcgtatcatcgatactgctctgaaatcttttgctacccatggtatcaagagcattacaatggatgatattgctgcggcactgggcatctccaaacgtactttgtatgaggtgttttctgataaagaaaccttacttatggaatgcctcctgaaggcccagcgtgagggagacgcttacgtgaaagatgtctatgaaaaggcttcgaatgtattggaagttttgttaaaactctaccaacggagtattgagaagtttcacaatactaataaaaagtttttcgaagacatcaagaaataccccaaagtctatgcagaattgatgaagcgtcgcaaccgcgattctgaggaaacgattgccttctttaagctgggtatacagcagggatatttccgcgatgacgtaaattttacgattgtaaacctgttagtacgcgaacagctagacttgctgatgaatacggatctttgcaaagaccattctttcctggaagtatatgaatctatcatgttcacctatcttcggggaatatcaacagaaaagggcgctcgcaaactggaagaatttatccgggaatatcgtaaggatcgacagtccaatacggaataaaagaataatcctaataaacatacagattgatttttatggacagacaactatttttggcaagcaagaaaattatgttgactgtgttccttttattggctataggccatatacaggcacaggagacgacagaaaccctaaccttgaccctcgacaaagcactggaaatcgcacttagtgataatcctacgataaaggttgccgaagaggaaatagccctgaaaaaagtggctaacaaggagacctggcagagtttgttgccagaggccagtattggcggaacatggaaccatacgattacggcggcccagatgaacctcggcggccagtcttttaaaatgggtcaggacgattcgaatacagtaagcggaaccttgaatatcagcttaccgttatttgccccttcagtctacaaagcaatgtctatgacgaaaaccgacatagaattggcggtagaaaaatctcgtgcttctaagcaggatctggtgaaccaggttacgaaagcgtattatcagttgatgttggcacaagactcttatgaggttttgcagaagagttataaattggcggaagacaattataacgtggttaatgcgaaataccagcagggagctgtcagcgaatttgataagattagcgctgaagtacaaatgcgtagtgtaaagccgaatgtcatttcagcgggaaatgccgttaccttatccaaacttcaactgaaagtgctgatgggaataacggaagacttcgatctcaagattgccgataatctggctaattatgagactgatttgtttgctaaccagctgaatgaattgaatgaaggtttggtgaacaataccacaatgaagcagttcgacttgaacatgaagatgctcaatcagagtttgaaatctctgaaaacaaacttcatgccgacactgggaatgaactattcttatcaataccagtcattgtataataataactggaatgtgttcaactataattggggtggaagttcagctttggtatttaccctgaatatccctctttataaggccagtaactttacgaaactgaaaaccgcacgaattcagatcaaccagctaaaggaaaaccgcacggatactgagcgtaaactgaatatgcagattaccagttaccagaataacatggcagcaagttcagagcaggtggtaagtaataaagagaacgtaatgcaggctcagaaggcagtggaaatagccgggaagcgctatgaagtaggtaaaggtacagtgctggaattgaacagttcccaagtatcattaactcaggctgaactgacttataaccaatctatttacgactatctggtatctaaggctgatcttgaccaggttttgggtcgcgactattcaattaaataagtaaaaaagaaaaatcacaacgatatgaaaaaaagtattcaattaattgccctggtggcagttgctctgctgagctcatgcggtggtggagagaaagacaaggctacagctgaaaaggtagatgaaaaaccgagagttaaactggcctctgtgaccgcacgtcctgtagaccagatacaagaatatactgctactgttcaggcagaagtgaaaaacaatattgctccttcttctccggtgcgtatcgatcagatatttgtggaagtgggtgaccgtgtatctaaaggtcagaaattggtgcagatggatgctgccaacctgaaacaagctaagttccgtttggacaatcaggaaatagagttcaagcgtaccgacgaattatataaggtaggcggtacttccaaatcagaatgggatgcggccaaaatggcattggacgtacagaagacaacgtataagaatctgttggaaaatactgcgttgctcagccccatcaatggtgtggtgacagctcgtaattacgataacggcgatatgtacagtggaggtgatccggtgttggtagtagagcaaatcactccggtgaaactgatgatcaacgtttccgaaggctactttgcgaaagtaaagaagggcgctcccgtggctgttaaggtagacgtgtatggcgatgaagagtttgaaggaacgataaatctggtttatccgaccattgattcgaatacccgtactttccctgttgaagtgcgtttaactaaccgtgaccagaaagtccgtccgggtatgtttgcacgtgtaacactgaacttcggaacacaggagcacgtagttgtgcccgatttggctattgtgaaacgtgccggttccggcgaccgctatgtatatgtatataaggacggaaaagtttcttataacaaagttgaactgggacgtcgtatggatacggaatatgagttgatttccggtgtggataacaattcgcaggtggtcgttgcaggacagtccaagttggctgatggcgtagaagtagaagtcgagaaataattattaattatgaattattaattatgaactaccgtgcggcatgatagcgcagccaattcataattaataattaaaaattcatcattaaataacatgagtttatacgaaggagcggttaaaaaaccgattatgacctcgctctgctttttggcagtagcgatatttggtctgttctctttgtcaaaattgccggtggatctttacccggatatcgagaccaacaccatcatggtgatgacttcctatgcgggagccagtgcgtcggatattgagaacaacgtgacccgtccgttagaaaatacgctgaactctgtcagcaacctaaagcatattacttccagatcttcagaaaatatctctgtgattacactggagtttgaatatggatatgatatagatgtgctgacgaatgatgtacgcgataaactggatatggtaagctctcagcttcctgatgaggtggagacgcctattatctttaagttcagtacggacatgattcctatcctgcttctctccgttcaggcggaagagagtcagccggcactttataaaatattggatgacaacatcgtgaatcctctggcacgtgtgccgggtgtgggtacggtgtctatttccggtgcacccaaacgtgaggtgaatgtttattgcgatcctaacaaactggatgcttataatctttcagtggagaccatcagttctattattagtgctgaaaaccgcaatacaccgggtggtaccttcgatgtgggaaacaatacctattcacttcgtgtagagggagagtttaaggaccccaaggagatggagaatatcgtagtaggtacgcacaatggagcttccgtttatttgcgcgatgtggcaacagtggtagactctgtggaagaacgtgcgcaaaagacgtatagtaatggtgtacaaggtgctatgattgtggtacagaagcaatccggtgccaattctgtggctatttcacaaaaagtaattgatatgctgccgcagttgcaaaaatcgttgccgagtgacgtgaaactgggtattattgtcaatacttccgataacattctgaataccattgacagtttggaagagactatcatgtacgccatgctattcgtaattctagtggtatttgtattcttgggacgttggcgtgctacggttattatctgtatcactatcccaatgtcattggtagcctcattcatctatttgggtattatagacggcggttcgctgaatattatttcgctttcttgtctttccattgctatcggtaatgtggtggacgatgctattgtagtgcttgagaatgtgacgacccatattgaacgagggtccgagccgaagcaggcggcggttcatgccacgaatgaggtggccatctccgtaattgcctcgacgctgaccatgattgcggtattcttcccgctgactatggtgagcggtatgtccggtgtattgttccgccagttgggttggatgatgtgtgtgatcatgaccgtttctaccatttcggctttgtcatttacgccgatgatgtgtgcacaactcctgcgcttgcagaagaagcagagcaagatgttcattgcattttataggccgattcaacgtggactcgatgctctcgatgtgtggtatcagaaccgtttgaactgggctgtacgccatcgcatcactattatggtcggttgtgctactttctttgtagcaagtttgttttgtgctaagtatattggtacggagttctttccggcggctgataatagccgtatcggtgtgaacttgcaacttcccatcggtgcccgtgtagagcgtgcgcaagcgctggcttcggaactgacggaaaagtggatgaaacgttacgaaggtgtgatgagggtttgtaattatactgtgggacaggctgattcggataatacttttgcttccatgcaggacaacggtagtcatattatcagctttaacatcagtttggtgagcccgggcgaccgtaaagtcaagttggaaacggtctgtgatgagatgcgtgaagacttgaaggcctatcccgagttggataaggcacaggtaattttgggtggtagtaccggtggtatgagtgcccaggccagtgccgactttgaagtatatggttatgattttaccgctacggataaagtctcggccgaactgaaagagaaactgctgaatgtaaaaggagtgagtgaagtaaacatcagccgtcaggattatcaacctgaatatcaggtagacttcgatcgtgagaaactggcattacatggactgaatctctccactgcttccggttatctgcgtaaccgtgtgaacggagcattggcttcttattatcgtgaggatggtgatgagtacgacatccgtgtacgttatgctcctgagttccgtacaaagattgaagatttggagaacatccttatttatacaccttccggtgaaggtatccgtgtgaaggaccttggtaaagtagttgagcgctcggctcctcctactatcgagcgtaaggaccgtgaacgtattgtgacagtatccgccgttatttccggagttccgttgggcgacgtggtggctgatggtaatgccattgtcgataagatggacttgccgagcggtatttctatccagatttcgggttcgtacgaggaccagcaggactcgttctcagacttgggcacgctggctgtactgattatcattctggtatttattgtaatggccgctcagtttgagtctttgagttatccgtttattatcatgttctccattccgtttgcattcagcggtgtattgatggcactcttctttacgggcaccaacctgaacgtaatgagtttgctgggtggaatcatgttgattggtattgtggtgaagaacggtattgtgttgattgactacatcacactctgtcgcgagcgtggtatggcggtacttcactctgtggttacggcaggtcgtagccgtctgcgtccggtattaatgaccacgctgactactatcctcggtatggtgccgatggctgtagggcaaggtgaaggtgctgagatgtggcgtccgctgggtgtggccgtaattggtggtctgacagtatctaccatcttgacgctgattctggttcccgtgctttattgttcatttgccggtattggtatcagacgtaaccgtcgtaagattaagaaagaccgtgaactgaatgattactatcaggctcataaggagaagatgacgaaacccagaaaacaataattggatttataatttatgaattaccattcggtctttatcgttttgtagttcataaatcataaatcataaatcataaaaacatgaagtcagtatttataacattcgaccaggcattctttgagcgtatcatggcattgctcgaccgccagggttgccgtggattcagctattggcagcaagtgcagggacgtggtagcaagacgggtgatcctcactatggtagccacgcatggcccagcatgtgctctgctattattactattatagatgaagctaaagttgacccgttgctcgatgcgctccatcggatggacgaagagacgcagcaactcggtctccgggcattcgtctggaatattgagaaaactatatagtttacgcaagacgttcgcatagcctgtgcaagaccgtcgcatagggtagtggaggcgttcactaataacttgatagagggaaatcttacaaaacgtgaagatttccctctctttttatgtcttttctctatctttgcaaatcctttatggacaacatggaaaagaattatctgaaatatacttgcatttgggcattgattatattggcgggcttgttactgatgtactttctgcccgcttttacggtaggtgaacacgtaatgaggcgtgtcgacttgctgggtgacgtgcgtactcagaaagatattgcggaagaaccggacagtttgcttccgcctccgccgaaggtgaaacctgcatttgtggatacctgccgtgcgggtatgacgtgcattgaagactacagcgactctactctgcgtggcatgacacctttttaccgggctttggatgaattggcacagcgtccccgtcaggtacgtattgccgttttcggagattccttcattgaagcggatattcttactgcggatttgcgtaatatgttgcaggataaatatggtggttgcggagtaggttttgttaccattacttctatgaccagcggattccgccctaccgtgcgccactcgtttggtggttggcaaagccattctgtaatggattctactttctttgatcgcaaaaagcaaggtatttccggacattactttgttccccgtcccggtgcttatgtggaattgaagggacaaaacaaatatgcttcccatctggatacctgtgaacaggcttctatcttcttttatagtaaaggagaagtcaccctttctgtgaatgtcaaccggaatgaaaagcaaacccgtactttcctggctacagatgatttgcaggaaatgcaagtggatggaaacatcggttctgtccgttggacggttgatgaggcggactctaccttattctatggtttggctatggatggtaaaaaaggaattatcctggataatttctctttgcgcggcagttcgggcttatccttgcgttctattcctgtgtggatgatgcatgaatttaatgagcagcgtccttacgatctgattatcttgcaatatggattgaacgttgctactgaacgtgggcggaattatgacaaatacattgcaggtatgcagactactattgatcatttgaaggatgcatttccacaagcaggtatcttgatagtcagcgtaggtgaccgggattataagacggaagatggtactctacgcacaatgcccggcattaaaaatctggtgcgttaccaacaaaatctggcggcggataacgacattgctttctggaatatgttcgaagcaatgggaggagagggaagcatggcgaatctggtacatgccaagccttctttggcgaattatgactatacgcatattaatttccggggaggtaagcacctggcaggcctactttatgaagcgcttgtgtatggaaaggaacagtacgacaggaggagggcttatgaagcggaataatgtaaatagggttctattgaacgattttttaggcgcggattacgcggattacacggattacagtgtagatacgaatactctaaatgtaactttcttgagacaaaagaatccgtgtaatccgcgtaatccgcgcctaaaattttcttatatactaatattctttcttctatgcttttttccgcttcatgcccaggaccctattccatcctgccctctaattagtaaagtcacagcaaattgtgacacactccgttcttattcccagcgtacggatactgttgctgttcctcaaatagcttttccttccggctttcagcaacttggtgaaaatgagttgacggatagccttggcatcctcaatcctttttgggaaaagttgcgtctgttacatgccggcttttctacagataccatccgtatcgtacatatcggtgacagccatatccgtggacgtatcttgccccgtaccaccggaacgctgctgacagaaacttttggtgctatctcttataccgatatgggtatcaatggcgctttttgtaccacctttacccgtcccgaccgtatttctgatattgccgccctgcatcctgacctggttatactgtctttcggaacgaacgaaagccataaccgacgttataacaccctgttacactaccgacaaatggatgaactggtgcgtatgcttcgcgacagtctgcccaatgtacccttactgatgacaactcctcccggttcctacgacagcttccggaaaagtcgtcgccgccgcacctattccattaatccccgtactgctattgccgtagaaaccatgcgtcgctttgctgatgacaacggtcttgcagtgtgggatatgtacgaagcggtgggagggagacagcgtgcttgtctgaactggcaggaagcaaaattgatgcgtccggaccatgtacattatcttcccgaaggatatgtgctgcaaggtgaattgttttatcaagctcttttaaaagcctataatgattatgtgggatattgactttaaccgtctgcgagacgtattcgtttatgacccgcaagcgccgatgatattcagtagcggtattttcttgtggttgtttgcagcatttatactggtttatctgctgttgcaacaccgtctgactgcacgcttgttgtttgttaccgcattctcctattatttttattataaaagtagcggaacttactttttcctgctggcacttgtcacggcaagcgatttctttattgctcgttttatggcaggtacttccgtaggctggaaacgtaaggcaagtgttgtgcttagccttgctattaatcttggtttgcttgcatacttcaaatatactaattttctgggagatgtcttcgcttcgctgctaggcggcacgttccatcattacgatatattcctccctgtgggtatttctttctttactttccagtcacttagctataccatcgatgtttatcgcaaagatataacccctcttactaatttgctggattatgctttttacgtatccttcttcccacaattggtggcaggtcctattgtacgtgcccgtgactttatcccacagatacgccgtcctttgttcgtatcccatgagatgttcggaagggggatattcctgattgcaagcggtctgttcaagaaagcgattatttcggattatatcagtgtgaactttgtagaacgtatttttgataatcctacgctctattccggagtagaaaatctgatgggtgtttatggatatgccttgcaaatctattgtgatttttccggatacagtgatatggctatcggaatagccttgttgttaggttttcattttaataagaactttgactctccttataagtccgcttctattacggagttttggcggcgatggcacatttcgctttccagttggctgaaagattatctctatatatctttgggtggaaaccggaaaggaaagattcgccagtatgccaatcttgtcattaccatgtttttgggtggtttgtggcatggcgcttcctggaattttgtcgtttggggattgttccatggcattgctttggcggcacataaattctggatgacgttgactggaagaaagaagggagaagaaagtcacggcatccgccgtttcttcggtatactgatcacattccactttgtttgtttctgctggatattcttccgcaatgcggacttttccacttctttggatatgatcaaacagatctgtaccactttccgtccgcaacttttcccgcaactgattgcaggctattgggaagtgtttgcactgatggcattaggtttctttctgcatttctgccctgatcgttgggagaacgcttgctgtaaaacagtaacccgccttccccttatgggaaaggcggttctgatgcttgctttaatttacttggtaatccagatgaagagtacggagattcagcctttcatttatttccagttctaaagtttctcctctcccttcattggggagaggtttctaatccacctctatttcgtcaatgaacatataagcagcttttccttcgcctgcatgtcctttcggcagggcagggctgcgcttgatgacaactttcacataccgtgctttcaccggatcgaaagttatctcatagttttccacacctttcttatcaatgtttgtttctgccggaatatccttaacggctacttcgcggaactctttgttatcgtcagatacagagactaccaaccctgtacttcccataatccaggcactcatatcgacaatggcgttcgtagctacccgcttgatttctgtttcctgtcccaggtcgatgatggcttccacatcaccacctacaaagcctaaccaggctccggtggcatagctatcatttcccttcataccatctactaaggtgatagcacctccgaatttatatttttccgaaggctggaaggtcagttcgatagggcaatatgtagccttattgaaagaaatctttttattcaccactttactcttttcttccgggcggataaccactgcctggaaatctgctgtttcagtaatggcaacaggctctgtgtatttcaatgaagctgtagtcggttcggtcccatctaatgtataataaataggagcgtcatcaatagtactcaatgtgactactaccgctttcttggcaacatccggcgtgaagtcgaccttcaaatcgaatacatgcttggcatagttgaagccatctctttgatagaacttcatcaggcgagccaggcgtttagtgaaatctttgaaatctttcttttcgggttgcgtccattgtacttcggcaagggcagccatacggggtaataccatgtattccacatgttcggtggtagttatgtactctgtccataagttggcttgggcaccaataatatgttttttctgttcttcattcagatcgaaagtaggatccagactatacaccttttctatgggtacatatccaccgatacccagcggttcatccttggtgtctgccgtctgataataatcgaaataacaataggtattgggcgtcataattacatcatgtcccatttgtgccgcttctatgcctccggatgctccgcgccatgacattactgtcgcattgggggctacatcaccttccagaatttcgtcccagccgataatccggcgtcccttgctgttcaggaacttctcgatacgtgtcatgcaataactttgcaggcgatcttctgcggtatgttttttatcagctttcagcccttccgctttgatacgtgcctggcatttcggacatttttcccaacgggtacgtggagcttcatcgccaccgatatgtacatattctgatgggaatatttcgatgatttcactcattacgtcttccaggaattgcatggttttatcattaccgatgcagagtacgtcttcaaatacgccccaacgaggacatacttcatatggaccgcctgtacatcccatttccggataagcagctaatgcggcaagcatatgtcccggcaagtctacttccggaattatcgtgatgtaacgttcctgcgcatacttcacgatttctttagcttcttcctgtgtatagaaaccaccatacggcgtattgtcgtactcttgtgtgtttcttccgattaccgtacgactgcgttgagaacctatttccgtaagtttcggatatttcttgatctcaatacgccagccctggtcttcagtcaggtgccagtggaaagtattcatattgtgcagtgccagcaagtctatatatttctttataaactctttggggaagaagtgacgtcctacgtcgaggtgcataccgcggtaactgaaacgcggttcgtccttaatttcacctgccggtatcaggacggttgctcctttggcttcggcgggaatggatttgcgtaaagtctggatgccatagaacactccgttttcggtttgtccgttgatgctgattccttcgggggtggtagtcagcacatagccttccttgtttgcaatgcccgggtcgagccccagtacaattgcatttttcacttgttctcctgccgcgatggcctttgttttcggtgcgtagttcgtggcttgttggatgtactccgacaggaactcagcattgcgttgcaataaggcattgttttccggataagcgatgagaacattttcgttcagtttgaacggatttccctgggttaaacttacctcttgggggagaggtatcacttggtagttagcttctttctccgcggtacacgaagcgcatgccaaggcgagagcacttgcaagaagtgcgtggttaagttttctcatggtgttagtatttaattgattgtacaaatgcaaatgtacgtgattatcttcgaattttcacataaacggacgcaaaagtatacttccggtactgaagaaaactacaaaccggcctgtctgcttaaagtccggtaaagttcgttcatcttctcatttctcaatgcgttgatctcttccgcttgtccgggtttcagataatctttgttgagtttgatgaaacgtttgtccagtttcccggcttcaccgatgatttttttaagttgtgtggcaagtccggaagcctgtgatacatcatacctcgaagattcgtaggtgaactccacttctttgtactgaagatagttgatgcgcaggtccagcatcaggcgataatgttcgaattcaccgccctgtttccggggaacgatcttgttgaagctgcttttcaactcttcacattcctgtatcacctgttctatcggctttcctttagcatcctttccgtgacggactaactcttggggaagcaggaaatagttgagaaaggtttgcgcttcgtcctccgacagcccatagcgttgctgtgcatactcttttatgaaagtttcggcatgaatcgcttttgatgaattgaccgctttacaataagcgtctatcagcaattggaatcctgacatgggatatacctgccggatgggttgcatactgattatttcccaaccgttatcatagtggaaaccataagttccgctggttgaccaggaagtttctatcattccctcatatccgtgagcacgcgcaaagggcaggaaagtagccaggttattgaaatgcttcatccactgggtcagatatgtattgtcgggtgccgaacgcagtgaggctgctccccacatctttacaccgagcttcagcagattatccagtttaccgaagcggtccggttcccaaccgtaattccagtcaacgtagatgagatctttgggtaactcttgaacggcttcggggtgcatcaggataatatccgcccagatgataggtttctttcccatttccttgaccacctcgcacatggcttttatgtagtcaacaaaaaggcgcgacttatttacttgggaacattgtgcgcaacttcccaacagataagtttcgtcagctcctatatggaaataaggtgacggatgcaattctgccacttcccggaagatttcccggaatacctttttagcttcttctatcttgaggggacatacttgcgacacttccttactgtcttcacgcaaatgtgcgtaccggtcgtgccttaatatgtattcgcaatgtccgaaacagttctgtaacgggattacttcaataccgagcgaagtgcaatagcttacaatatcctgcacttcgctgcggctgaatgccaattgattacacaaagtagcatgcttttggaaagggaatgttgcttcatactctatcagcagagtatttatctctttctttgaaaggtcggacgccagttccttgattgccgaaaccgtcattacctgtgtacggcaatccagatagaaagccctgactttgaagtcggaaggaggggctgcgctacgggccggaacacacaggcacaggaatacgcttactaaaagtaaacttttgtatatggaacgaagggtatgattcatggtctttattttttagatggataaaagtgacgcactgtcccggtcacaataaagcgtcgcatggggatgagtacgtaaaatagaagccgggcaagtggtgctgacagggccgtataatgtttctttcacagcattcgccttcggctttcccggtactatgcaaaagatacgggtagctttcatcataaccggtatcgtaatggtgactgcctgttggggtactttctccagactggagaaacaaccgtcgtgtacctgttgtgtgcgacatatctcgtccagtaataccacttttacctgctggggatcatcaaacaatgccacatgcgggtcattaaaggcgatgtgcccgttttcaccgattcccatgaaaacaatgtcgatgggatgcttttgcagaacttcttcatagtgggcgcagatgttttcgggtgaggcgccttctatatataaataatgtatagacttgaagggaagtgcggcaaatatgtgttctttgagataattcccgaagcgttgaggcgcatccgcttgcagaccgatgtactcgtccatgtgcaaggcatggatgcggttccagggaagagcatacttctgcaaggcggccagaaactcgttttgtgagggggccgctgcaaacagaatattgatttcctctttttcttttaataattggttgatactttcggctgctgcttgtgcggcatcttcgcccataatctggcgggtagcgcatatccgtgccagtaaagcttctttcttaatttcttttatgttcatggttgttcaaataatgtttctccgttaatgaatacccggttgatgcggatatccgggtcgaatattacaatgtcggcatcatatcctttggcaatctttcctttcctgtccgcaatgcccattatttcggcgggggtgagcgtcatcatgcgcacggcttcttccagggggcgttctcccatccgatacatattccgtaccaaccggtcggccgtagctacgcttcccgcaaaggactggcggtcgggcatcttggctactccgtcctcaatgagtacttcgcgtcctttggcacgactgcccaatatgcttttcccttcgggcatacctgcaccgcgcatggagtcggtgactaaggcaatcttctccgcacccttattctttactgccagtttcataagcggtgccggaacatgtacgccgtccgttatcagttcaatggttgtttcgtccaataaatatccagcttctacacaacctgcatagcggaaggcgttccggcgggttactccattcatgcaggagtagaagtgggtgatatgggtaaaaccgtgtttcacggcttccaccacatcttcataaatggcatctgtatgcgctatggaaggtaatatgtcacgtcggtgcagtatatcaccaaactcaagtgcccccggaagttcgggagcaatgctccaccggacgatatcctggctcctgtccaatatctccatgtattcttcgggagaagggttgcgcagataacgcggatcctgtgctcccctgaaggcataggcaaagtaagggccttccagatgtaaaccaccgaaagcggcacccgaacgctgatcttttacccggtcgtatatatcgaggaagcgaaacagttcctgattatccgaagccagtgtggtaggataaagtaaggtagttccatgccgcaggtgttcgcgggcaatggtgaggcagtcttcttccgtacaatccatgaaatcggaatcacctgcgccgtgtgtgtgcaggtcgatgaatcccggggcgatgtagccgccgtgtgcatcgtgacctatgctgccgggtacttcatagtttcccggctctatgccgataatttttccttcggcaatgagtacggttcccactccgaagttacgttccggagtgatgatttcaccgttataaattctggttatttgtcctttttcagtttccataattcagaccaatgattgattttatatccgtagaatgcgtaaaatatcaaataaagaaagcagggaatcagcacgatatatccgatccgtaatccgtaatgatcggctatcagtccatagatgaccggcatgaaagcgttgccgcagagtgccatcaccatgaacgaggaacccaggttcgtccagcgtcccaggtcatgtatggcaagcggccagattcctgcatagatcagtgcgttgcatactcccatcaggctcaggcaccagatggagagggaagtggcatgtccgtacatctgtacttctccgggaatcaccagtacacagaccgataataccagtccgcctacggtgcagatacggaacatgcgttgctggctggcaaaccggggaatcagcaggataccgatgaaatatcccacaagagcacaggacaaagtgatgctggggaatatcttggcttcgtgcagattgaatcccatactttcggcatagctgataatcgtatcgatggaaatcacctgggccgccacatgaaagaagatggcgaatactcctaatataaggtatgggtacgagccgatagacttgtggtcaccggaagagtgggtactcttttcctgttcattactcagatcgggcagccggatgaaatgtatcgcgcagccaaacaggaacaagaacagggaaagtatcgagtaggggacaataaccctccgtatcagttcgtccagcaagaggtctttctctgcacctgccacactgttactcttcagcacttcgaacaattcggtatccgttgatttcaggatgacggcggcaaacagcaggggggcgatgattccggctatcttgttgcatagccccatgatactgatacgccgggctgccgactctatgggtcccagtatggtgacataaggattggctacggtttgcaggatagacagaccggtacctatggtgaatagtccggtcaggaagacgggataggcccgggtgcaggctgccggaacgaataggacggttccggctgccataagccacaatcctgcgatgataccccgcttggggccgatccgaccgatcagtttggcagcgggaatagacatcacaaggtaagcgatgtagaatgccagggctaccagataagactgggtgtgggttaactcgcaagccactttgaagtagggaatcaagatggagtttacccaggataccagtccgaagatgaaaaacagcgttcccagcatcagcataggcagcagattggaggaaggcttttgttgaacgttacctttaaacatacctttttacagttttatataaatacgtttgcgatagagaatgtatcccaatgcccatatcaccccgatgaagaacagggcatagaccagagatcctgcataatctcccagcaagggttgcagcgtccggttgtagataattccccggacactgatggttgcttcgccccacgggatgaatgacaatccgaacagtacgctgatgatccatgcaactacatacatgaaaagcggattcactccaaaggcttcgaagaagcggcaccaacgctttttctgcctgacgtcaatgatatctatcagtaaagcaagaagcagggaagcagttccggaagtgattaaagtgtaggaagccgtccacagtttcttgtttatcggatcaagatattgtaacaggaaaccggcgaacaacaggaccgtaccgaacagggcgatctgacggatacgttccttattctccgctatccccgtaatcaggcttccaacgaacgtgccgaacagtacatgcgcccaacaaggaatcgtactcagcagcccttcgggttcgaaagcaaagctaccgccctcagcggcctctttgattaaatgtcccgctcccagcagtttgacgtcaatcaccgcaatcaagttgtctgccgaatgtacatatccgttgaaacattgcagcaacacaagatatagcagcagaattcctcctgccgtggcaagataatacttcttcggaataagaattgccaggaatgctccgcctgcataagccaatgccaaccgttgcatgacaccgagaatacgcagatgttcccaggagaaagtgccgtaacaaagtttggagaaacaatccaatgctattcctacggcaaagagagctacggtccgacggatgattttcaggctgacggtggtattgagtttatcgaacttgcgcaatgaaaagtggatggctacgcccatgataaacataaaaaagggataaaccaagtctgtgggggttaatccatgccatcgtgcgtgttgcaacggggcatagacagactgccaggaaccggggttgtttaccagtatcattccggctatggtaatccctcttattacatcgagtgcaagtaatctattgtttggggccgacataagtgctgaatgttttgattattaatagtttggatgctcttcattaaatgaaaacacccggatgctttattctactcttgcaaaaggtggcatcttttgtagcaaaagatgccatctttaacatcataagatgccacctttcgttgcaaaagatgccatcttttgcatgtgatgttttattgcttcatatcctttcctttaatgaaacgggtcttcggaatatggcttctgcaagaggatgcttaatgttcggtgaaagcgtcatagagtacctgaagcagactctcttctttgttgggagaatcgtgcgagatagcccatatcatgatacctccgtaaccgttgtcatttacatacccggctttggcacgcatggttggtttgccgttgtagaagagtagtccgatttcgtccttctccatggcctgttcgttgggataattcgttagaatctccttgtacggcatgtgtgtagcccctaccggggtttcagcggatacgaagtgtacaccgtagaaaggcactccgaggataatcttttctttgggtactccgcggatttcactccaacgtttggctgccatgcggaagtgttccatgctggcgtgctgagctactttcgatgatttccaaccaccggtgaagtcgtacaccatgatattgaccaggtccagatattcaaacatcgagttggtatatacattatagtttccccagcccccattccattccggatagtcggcactcacggcggcagtcagcagtttgcctttgggaagttccgtcctcagttctttgtagaagttttcaaggagggctactttttccttgtcgccttctccgtagccttccggaccgcctgcccagtgttcgtagtcgatgtcaagaccgtcgaatccccagtcttccacagctttcaacagttcctttttgaagcggttgcggtaagtatcattaagcagtacacccgccataatggctttgttgccgcctccacctgcggataacagaactttcacccctttcttttgcccttcgcggaaaatgggcaaaagcttttcgatgttggcggcatcagccaggccaccttcttctgtggcgcgtccgaaggcgatgctcaggtgagtcagttgatcccagggaatctggtattcgggcaattgttcatattgcaggtatccgaagataatcttggatggtttcttgggtgcttcttcctgggaggttcctccgcatccgaagaggatgcagagaagtgcccatagagtcagatatttcataggtatccgtatgtttttaaggtgctgttactactaaagtgaattctctgaaattagtggttccgtttcgtaccgcttcaaagcgcagcttgaaacttccggtctgggtgaatgtgtagctcagtgtaggggcggttccgatcacttcaccgtccagcaaccacttgacggacacgctgccgtctgccggagaaaccaggatagggaattccgtgagggtgcctgctatggctgatacactttccaacatgtcggtatagatatagagttcatcatcggcaaaggtcgggttgcttgccgagtcgtctttacaacttcccatggcgatgcccaggaagcacaatattagaaaaatatacttggttttcataatttatccgttctttttaattgtgtaaacttattctttatcccaccatacacgactggtccagctgtctgttcctcccatgcggctgagtgcttcttccagattttccttgttcttaatctgttcttccagcggatacatcatgcggttggggcgtttgccgtccgattcgttttctgtgggagccaggttgtagaacttagtgtacttgctcggcataccgctgcgccgtatgttagaccaggcttcaatcgggtcgaggatatagagcagccacagttgtttgttgatctcttccagcgcctcggtgtcgcctgcatccagcagtgaagactgttcttcggcgagggcttccagtgtggcgtcatcgggtacattggcgccaaacaggctccattgcttgatggcggctaccagacctttcttatagtgttccttggcactttcggaagatacattccaatggcgggcagcggcttcagccaggtagaattctgtttcggcataagtcaggtgcatataaggagatgctggatcagtcagcagtttagagggttgcatcttctggtagtggtgtgctacacttacatcttttccatcgatattgatggtaagagccggtgcccaggcattgtagatgaaatcttgtgccggcactccttgatacgaaccggtcttttcgtaaacaatggacgtgatatccgtgcgtttgctgtcggtatagtaggcgcctccgatgtagagagtgcgcgggtcgttggtggaagtcagcgcttccagcaattcgttggtcatgcggtagttactgtaagtaggatcttccagcatctggttggcaaatccgttgcccggaccttcgtccagtctgctcgattcgtgcgccacataacagatatcgctgttagaggtcatcactcctgcctcataagccgctttggcttcttgctgggcaagtgtggggttgactttcagcaggcgcatggagatgcgcagccataaggaattggcaaaccgtctccatttctcgatgtcgccattgaagtaaaggtcgttctgcggagccatagccgatgcgtccagttgggcggaggcggcgcggagttcgctcaggaaatccatgtagatatcttcctgtttgtcgtatcggggtttcacgatgttttcattgtatatctttccggcttcaaagtacggaatatcaccgtaataatccgtcagtttaaggaaagcctctactttcaggatgcgtccgatggcattcagattgacttcttccgggttgtcggtggtctggctgaccagtgcgacggcattcttaatgatatcgggataataggctacccagaggcgttccatgtaggcaatgttctttttggcttttccgccgtactcctgcatactccagccgccaatccagtggttgacgaatgcacccgggtagataaagtagcggatggtgttctgcatatattgtgaatgagtcaattgtatggtcggaatcagcagatgcggggatatgctggttgccttggttggattctcgttcagttcagtcaggtctacacagctgcacaggcagatgaggccgataaataaggaactccattttatatttttcatgttgatatgcgttttagaatttgacattgatgccgaagccgaaggtgcggcgtgagggtaatgagccatactcgaagccctgtccgttaccgttgttgtaagaagattcagggtcgatgttgtctacttttgaatagatcagcagcaggttgcggccgtaagccgagagggtgacggactcgataggagtatgtacgaaccacttcttggggcatgagtaagagagtgatacttcacgcagtttcacgaaagagttgtcgcagatgaacggttcgggggaagagttttgcaaggcttgccagtatttggcgggatctacgtacacatcgttgggcacatagcttacgttaccgtcggcatcggttacggcttttactcccttacctacataacctccggtcggtgtccagtctttggcatccacgttggccgacaggcgggcttgctcggaggcgtaccagccttcgcgtccttccagggtttctttggaagtaccgtttacgtgcgactgcatcttactcatggaataaacgtccgcaccgaatttcatatctaccagtacactcattgataagtttttgtaagagaaagcattgcggaaacctaaagtgaagtcgtagttgccgtttcctaatacggatactttatcgtcgaaagtaggcagaccgttttcataaatcacttcgccggcttctgtacggttcagtttcttacctacgatgacaccgtaaggttgtccttcgcttgcgtagatgaaggcgttggcccagcgggcggctgccagttcaaagtctttcacgtcttcgtgcagtttcactacttcattatagttcttggcgaagttgatattggcatcccaggtgaggtttttggttttcaccggtacgagtgacagagaagcttcgatacctttgttggaaatctcaccggcattgatcatggcacggctgtatccggtagattgtgaaaccggcaatgacaggatctggtctttggttatctgttggtagtaagtaaagtccagtcccagacggttatccaggaaacgcacatccatacctacttcgaaagagtaagtcgaggtcggtttcaggttggcattaggcacggaaccggaagtgatgtagcccagagaagttcctttattggtataaggtttcagaccgtattccaattgaagctgataggggcttgtgtcaccacctactttagcccatgaagcacgcaacttaccgaaggtgaaccattctttgtgctcaaagaggttggagaatatcaagcttcccgaaaccgaaggatagaaataagaacggttcttggggcttagagtggacgacacgtcattacggaacgttgcatcgaggtatgcaaactctttgtagcccaggctgacctgtccgaacagggagcgcacggctttacgcaccagggcatgttcggtttctatgctggaatagttggtgatgtcctgtaaaccggggattacctgcgtttgtccggtctggatcatggattcgtactcatagcgcatcacattgccgccgacgaaagccgatacatcgaaatcaccgaaacgcttttggaaacgaagcatcatctcgaagttgtactgcatcacgttgttggtcatttccttcatcattccatcggtaaatccgggggtatacatcggagtgaaatcggtgaagcggaaggtgtaggagtccagaccggctttgaagctggctttcagataatcggtgaatgcatagtagaggcgtccctgtccgatgaggcggtcgcgtttggacttattgctcatttcattgattacccagtaggggttgatgcggtatttgtcaccgttccagtcattgtaacgtccggtttcgtccttgtagttactggataaccatttctggtcaaaactcggcgcgatacctatcagggcattaccaagattactcggactgtcggacagggcggggcggttctgcacggattcgtaactgtaagtggcctgtgcttctacggtcaggcgtttggaaagctgggtgtttcctttaaaagagacactggtacggctcagttccgattcgggcacgatatcccagttgcgcatatcagatacggatacacggaaagccgacaagtcattggtcttgctgaaggcaacggcattggtggtagtgataccggtatcgaagaaactcaggatgttgttgttcacattaccatacttccgtatctcatcattatagatatgtacatccatgttggggtctaactttccaccccaagctacttgcgaagtagtcgatgccgactgaccggacatcgagggacgcccgtcgcggccctgaccgtagacgcgctggtaatcgtcgaagccggtcagtaatttaacaatgctcaggttggatgagaactccacacctataccctttttcttctgggcggacttagtggtgatgaggacaacaccgttggaagctctggagccataaagtgcggaagcggacgggcctttcaggatagaaatgttttcaatatcatccgggttgagggaggacaatacgtcaccatagtcgtaaccaccccatttgcctgcaccttccagttccgtattgtccaccggcatgccgtcgatgacatataggggctggttggaacctgtcagctgggaattaccacggataatgacgcgtgtggagccggaagggcctgctgttgtggaagagatatccacaccggctactttacccgagatggcagacattacattctgctcgttaccggctgtcagtgcgtcattgtttacggaagatacagcgtaacctaaagctttggcttcacgcttgatgccgagggcggtcactaccacttcgtctatcttcacggcttcttcctgaaggatgatggtgatttgggaacgcccttctactttgatttcttctgatttcattccgatatagccgacgcgtaacacagcgttgcgcgaagaagcattgatggtaaagcgtccttctacatcggtaatgacacctgtctggttgcttttgtcttgaatggtagccccgataatgggttctttgtctactccgataacgataccggataccttgaaattgctttgagccagagtaatcaagctacagcacatacatacaatgaggaagatacttcgcattgaagtgttctttcctgacgagttaggtaaaagaataaaatttctcactgtttctcattggttattagggttaataatagtggttgttttcccgtacttatagtaattcctatattgggttggagtcatctgatagattcgcttaaaggatttggtaagattgatgtaatcttcataacccagttcaaaggctatatccatgatgggcaggtctgaggttaacagtttctcggcgaaacaggaagtgcggtaatccagtatatattggtaaatggaaatgccgacttccttacggaaatgtttttccagtacacggcgtgaaacacaaaggcggttcagtatttctgtgatgctgataaggccgttgttctccgtctcaataagtttcagggcaccaaggaccagtttgtcacttaccgagtatccttctgttgactttctgcgttcaatgcggatgggattgataacgatattgaattgtggcagttgcttatccttcacaatgctgtgcagcagtttggctgcctgatatccgccgttctttacatccagcacgatggaagaaaggggagggtcggacatattgcagagtatttcgtcattatccactcccaaaacagccagatcctgggggacttgaatgttgctgataccgcagacttcggttatgcgtaaggcgaatacgtcgtcgcaggcaaacaaggctgtgggatgggggagttgctgcaaccaggcttggagggtctgctggtcggaagtggagccatagcggatgttgctctcttcattatagatataggcatgctgccctacttcggcgaggcgggtacagaaaccctcttcacgttcgcgtgaccagattgtatcactggtgccgtagaaagcaaaattagtgtaacctttccgtaagaagtagttggcggccatttcgccggtgccgtagtaatcaccggtaatattggatatgccgtccacacgattggtgtagttttgcaagatgacggggatgcctatggagcgcagccgttcggtatttacttcggacagctgtcccatgatggcatccgctccccagcgctgggcaatatcaatgactgtttcgattgctttttcgtcattgaagtcttcacggctcaatggaattcgataaaagcgccagttgcccacttccatggaatatcgcaggaaaccttttaataaaaggcggctgtacgcgctggtaaaatcggataatagcagtactttcagcatacggtattaaatttgcggttcgctttttaattgttcactgcaaatgtaaaccgtttgtgtttgttgatatgcgtcagtatgcgtttatttattgttgatttgcgtcaatgcaattgttttctatctattatattctttttgctctgtattctttcggtgacattcccgtatgcttcttgaagtaccgtccgaagaacgactggtcgggaaaattataccggtcggctatctcttttagtgagaggttggtggattgtagggcgactttgatttccagtgtgagaaactcatcgatgatttctttagcggaaatctggcctacctctttagtaatagcggaaaggtagcgtgtagaaatacaaagttgctcggcataaaaggctacatcccgttgcatggtacaattggtatgtaccaggtggatgaactttttgaacagctgtcctttccggttgcctccctccagttgttccttcgtgaaatatctctgtaccttatcataagtatccaggaagaatatctgaagtaggttctgggcaatgctttcgcgaaactgattttccttgtcggcatagatggcggcgcttgcctctatcattctcaggatggggcgtatggtttcgagtctggtatgtgtataacaggaattctctttcatgaaatgcatgaatgccgggtccagtcggaagcaggcaaccttcatcatctcgcccgaataagcgaaatagtgtatctggaagtccgggctggccgatctgagcgaaagaatagagccgggcaataacataatgttcgtattcggtataatgtgatgcttctccaggtctatggtgatttccgcttctccgccggaacagaataaaaggactccattcgttaatttgatgagtcggttgtgataaaactccaggttatcactcccggatctgaaggtttctgctttcgtagttaataatggattcatactttatctttttaaagttttgctgggacaaaggtagaagttctttttggaatgttaagcaaagcgttccgaaaatgaacaaaggagtgcgacaaatgaaacaagttgttgttcaaaaacggcatacctttgccgccgacataacaaaagatgtttttaaaaagattgtagtatgacaacaaagaagagattgattagacagatgatgacattcatttgtggagtaacattggtagcatgcggacaggctcctaccgtgcagaccagttctgagtatgaggtgatgagaatcacgacatccgacaaggaattgcaaacgacctattcagcgagtatccggggaagacaagacattgacatttacccgcaggtatcaggtttcctgactaaactctgtgtggaagaaggccaggcggtccgcaaaggacaagtcttgtttgttattgatcaagtgccttaccgtgcggctttgcagactgcggaagccaatgtggaggcagcacgtgcaagtgtagctacggctcaactgacgtatgacagtaaaaaagaattgtttgcccagaacgtgatttccgagttcgacttgcagacatcttataataacctgctgacggcgaaagcgcaattggcgcagacggaagcgcaacgtgtaagtgccgccaataacctttcttatacggaagtgaaaagtcctgccgacggtgttgtaggcactctgccctatcgtgtgggcgctttggttagtgccagcctgcctaaaccgttgactacggtttctgataattccgatatgtacgtttacttctcgatgacagaaaaccagttgctggatatgacgcgccgctacggttccaggagtaaagcattggaggaaatgcctgctattgaactgattttgaatgataaatccacctatccttcgcaaggtaagattgaaacaatcagtggggtgatcgatacttctaccggaactgtcagtctgcgtgccgtattcccgaataaagaaggattgttacagagtgggggagccggcaatgtagtggttcctgttcaaaaacggaactgtgtcgttgttccgcaagcggctacttatgaagtgcaggataaagtgttcgtatttaaagtagtagatggtaaagcacagtctgccccagtggaggtgacccgtgtgaatggtggaaaagagtatatcgtagacaagggtttgaatgtgggtgatgtaattgtggctgaaggcgtaggattattgcgcgaaggtacacctattcaagctaagtcagcatcctctgcaacacaagaaaccgctaatcaacaaacaaaggaggattaatccatgaatctgagaacatttattgaacgcccggtattttcggcggtcatttctataacgattgtcattctgggtatcatcgggttgtttaccctgcctgtcgaacaatatcccgatattgctccgcctaccgttatggtaagcaccacgtactacggtgccagtgcggaaactttgcagaagagtgttatcgctccgttggaagaagctattaacggtgtagaagacatgacttatatgacgtctaccgctaccaatgccggttcggtatccattaccgtctatttcaaacaaggaaccgacccggatatggctgctgttaatgtgcagaaccgcgtatccagagctaccggacagcttccgggagaagttacccaagtaggtgtgactactatgaaacgccagaccagtatcttacagatgttttcattgcatagtcccgataattcgtatgatgaaaacttccttgccaactatatgagtatcaacttgaaatcgcagttgctgcgtattgcaggtgtgggcgatatgatgattatgggtggtgactacagtatgcgtgtctggatgaagcctgatgtgatggcacagtacaaactgattccgtctgacgtgacggcagcacttgccgagcagaatattgaatcggctaccggttcgttcggtgaaaattcggacgaaacttatcaatataccatgaagtataaaggtcgtctgattacaccggaggaatttggtgaaatcgtaatccgttctacggaagacggtgaagtgctgaagttgaaagacattgcagatgtggaattgggtaaggacagctacgcctacaaaggtggtatggacggtcacaatggtgtttcctgtatggtgttccagacggccggttccaatgctacggaagtaaaccagaacattgataacctgctggacgaagtgcgcaaagacctgccgaaaggtgtggaactgacacagatgatgagttccaatgacttcctgttcgcttctatccatgaggtagtaaagactttgatcgaagctatccttcttgtaatcttggtggtatatgtattcttgcaggatatccgctccacattgattccgttggtaggtatcatcgtgtcactgataggtaccttcgcttttatgtccgttgccggattcagtatcaacctgattaccctgtttgcattggtacttgtgatcggtacggtagtggacgacgccatagtcgtcgtcgaggcagtacagtcgaggttcgatgtcgggtataagtctccttatatggcaagtatcgacgctatgaagggtatcagtaatgcggttatcacctcttcactggtatttatggcggtatttattcctgtatcgtttatgagtggtacgtccggtacgttctatacgcagttcggtttgacaatggcagttgccgtaggtatttcagctattaacgctttgacactgagtccggccctttgcgccttgttgctgagaccttatattaatgaagatggtacgcagaaaaataattttgccgcccgtttccgtaattcgttcaatgcggctttcgatgtggtggtgaataagtataagaatgcggtactattttttattaagcgtcgttggttgtcatggtcattgctggcttgttcagtagtattgttagtactcctgatgaattcaacgaaaaccagtttggtgcctgatgaagaccagggtgtattgttcgtcaacgtaagtacggctccgggtagctcactgaagactacggatgatgttatgcttcgtatagaagagcgcttggaagctattccgcaaaagttgcatattcagaaagtagccggttacggattgctttccggacagggaaatacattcggtatgattgttatgaaactgaaatcctgggatgaacgtacgaagaaagaagatcaggtgcaggctgtcatcggacagatttatgcccgcacggcagatatcaaggatgctacgatctttgcaattgctccgggtatgattccgggttatggtatgggtaatgcgctcgacctgaatgtacaggataagttgggtacggatgtgaataccttcttccagactacccagcaatacctgggtgctttgaatcagcgtcccgaaatctccatggcttattctactttcgatgtgcgttatccgcaatggactgtcgaggtagatgctgccaaatgtaaacgtgccggcattactccggatgcagtgctttccacactttcgggctactatggcggacagtatgtatctaacttcaaccgtttctcaaaggtatatagggttatgatacagtccggtccggaataccgcatggatgagtcttcattgcacaacacctttgtacggatggcaaacggtgagatggctccactgagtcagttcgttacgctgacccgcagttatggtgccgagacattgagtcgcttcaatatgtataattccatatccgtgaatgccatgcctgccgagggatatagtacgggtgatgccatccgtgccgtgaaagagacagcagaaatcagcctgccgaaaggttatggttatgacttcggtggtatcacacgtgaggagaaccagcagagtggtacgacggtaattatcttcggtatctgtattttgatgatctatcttatcctgagtgcgctttatgaaagcttcatcgttccgtttgcagttattcttgcggttccggtaggtctgatgggtacgttcttgtttgccaagatagcaggattggagaataatatttatctgcaaacaggtttgattatgttgatcggtttgcttgccaagacggccattctgttgacggaatatgctgccgagcgccgaaaagcaggcatgggattgattgcttccgcagtcagcgcagccaaagcacgtcttcgtcctatcctgatgacggcactcaccatgatcttcggtctgttcccgctggtggtagctacgggagtaggtgctaacggtaaccgttcgttgggtacgggtgtagtaggtggtatgaccatcggtacattggcattgcttttcatcgttccggctttgtttgtcaccttccagtggttgcaggaacgtcttcgtccggctcagtccatgccgaccaaagactggcagattgaggaggagatggaagtgagtaagaaagaaatagaagaatcacataaatgataggttggcactggatacaggagtattttcattctcctccgccggaggaggggaattgagatactccggttgtgtaaattcatcattttctaatgaaataaacaatataaataatgaagaaacaaatcatcactttagctgtcgcagccttgctgttgagtagttgcggcatctatactaaatatgaacgtcccgaagtcaagaccgacggactttacgggcaggatatagaggtggaagacaccacctctattgcctctctctcctggcgcgagttgtttaccgacccgcaactacaatctctcattgagcatgcactgcaaggcaataccgacttgcagtccgctcagtggcgtatcaaagaagcggaagctactctgtcatccgcccgtctggcctatctgccttcttttatgctgactccgcagggaggtgtcagtagctttgataaatcaaaaggttcctggacgtatagcggcatagcgtccgccagttgggaaattgatattttcggtaaactgaccaatgcgaaacgccgtgcaaaagctttgtatcttcagagcctggagtacgaacaagctgtcactacttcgttgatagccaatgtggcaaatatgtattataccttattaatgctcgatgcacaatacaacgtctctgccgaaactgccgccaagtggcgtgagagcgtgaagacaatgcgtgctatgaaagcagcaggtatgacagatgaggccggagtagcccagaccgaagcaaactgttatatggtagaagcctctttgctcgaccttaaacagcaaatccgtgaagtagagaattcactttctattttactgggtgatgtgcccgacgccatcgaacgtggaaagttacagggacaaagtttcccggaagaacttaccgttggtgttccgttgcagttgctctcccgtcgtcccgacgtgaagagtgcggaactctcgctggcacaggctttttatagtacaaatgcggcacgttcagccttttatccttccattactttgggaggtacggcaggttggacaaactctgccggaagcatgattatcaatccgggcaagttgttactctccgcagttggttcactgacacaacctttatttaataaaggattaaacatggcacagttgaaaatagccaaagcccaacaggaagaagctaaactttctttccagcaggcgctgctgaatgctggaagtgaagtgaataatgcccttacccaagtgcaggtggcccgcggtaaaacagagttgcgcgacggacaaatcacttcattggaaaccgcagtccgaagcacgcaattgttgatgaaacatggcaactccacttatctggaggtacttaccgcccagcaatcgttgctctctgcccaactgacgcagatagccgaccgcttcgatgagatacagggaattatcaatctctaccaggccttaggtggtggcagggaataaagaataaatcatatactctctcttctctcgtttcttcatccccttttatccttcacgaagtggagtggtgagaggggatatttttagtggtcactcaccactaatcacttattgcaggtactggtcgatctgtgccaccgttgcatctttcagcagtactttcttgtctttatccaatagatacagggtaggtatcgctttcaggtcatacagattcttttcctttataacgagttttttatcatacccgtttatccattctttggggaagtccggtaggtgtctttcccattcttccttatcttcatccggataaatagccagtatttttagacttcctgctgcaaactccttgttgatggcaggtgcttgtttcagtgcttctatgccttcttcacaagcatgacatcccggattgttgataaacagcagcgtatatttagctttcactccgtagagcgtaccgttttttccggacagcagtgtataggtgaaatcttctgccggccttccgatacgattctgttcagccagttcccggcgtccttgcggaagtattttctccgtatcattcaatactttactttccagcatggcgtccagtaccggaatgtaaaattcttcgttccgcatcggagaattcggatcatacagatatttttctgctaagtcagtataatagaagaatacgactttcttctgatctgccatcttatacatttgctttatggcagctatcgcagtagtgtccggcactatcttcaggatatctataaagtccacccatgcttgttccgtaacatccggaaggttgatataagtggtgtcggtaaaatccatattgtcccaatagtgccgtaccagatagtccgcacgcaattcgggagtgttcagcatggctggtataagggggagcgtgaattttcttacggtgtctgcctggactgccgtttccttgttgtcgttcgctttccggctgccgcatgaggcacacaggatcaggaataggaggaaaatgttgagagaagttttcataattcaactacttatataatgtattgagagacaaagataatgcaaatgttttaattaccatttgttaagtatcagcaaatttatgaagcctacctttgccccgcttttttaaaaacaatgagatatgcaaagggataatttggacttcaaaaacatgagtgtgagtaagttgtttacaaaacaactcttccccacgttgctgggtatggtatcatccgcattgttcactgttgtcgacgggatattcgtaggacgcggaataggcagtgatgccattgccgcggtgaatattgcggcgcctatttttatgatagcggccgggttgggactgatgttcggtatgggtggaggaattcttgcttccattaatctgtctcgtggcaaattggtggtcgccaatatcaatgtcacgcagtcaatcgtcatgctgacgattgtcagtatcattatgggaatactattgactgtgttccccgaaactgtagtaaccttattaggagccgaagggcatctgacggaattgtcggcggaatatttgttttggttctccatatccattccgtccacggtcttgctggtggcattgccgttctttgtacgcctgacgaatcctaactttgccatgtgggccatgctggcggctactgttgtcaatatcttgctcgattatatctttatctttatttttgagtggggattgttcggtgctgctatcgctactgatttgggagaattggtggggacacttttactcttgggttatctgcttcgtccctccgtatcggttcgttttgccaagctgaagatgagtatcaagagtatccgcctgacactgaggaatacatggtatatgctgaaactgggtgtttcatcctgtttgagtgaaataacgattgccgtcatggctattgccggcaattatgtgtttatgagccatctgggaacagatggggtagcggcttatagcattgtctgctatctgttccctattattttcatggtgtttaacgctatggttcagtcggcacagcccattgtcagctacaattatggttgcgggcagttgttgcggtccaataaggcgctgcgtttatgcattatttccgcggttgtgtttgctttgctgattagcggagtgtttgtctgtttctccggtgatatcgtttccttgttcttgccggaccggacaagtcatgcctggcagtatgcagttgctggtctgcctctgtttgctgtcgattacatttttttcgggataaatgtaatcacaatagggtattataccagtattgaacgtattaatctagcaatgaggcttacgttgctgcgtggtatattgccggtcttgttcttctttgtacttcctgcatggttgggagtgacgggcatctggcttgctgtggcggcgggagatattactacaacaatccttattgtgctgtgcagaaagaaagtttagtatggctgtacctatgaattattttcaatacatttgcatacaaaaaaatatatttatcatgaaacgcaactctttcttattatttgtagcgattctcttcacttctgtttcagtttcttttgctcaaaagaaactctccatccttggagactcttattctacatattacggttatgtcactcccgacaccaacctctgttggtatggcgtaccggaagaaaagagagagaatgatgtgaagcgggtggaggatacctggtggtatcttcttatcaatgagcacggttatcagatggagcgtaataattcctattccggttcaaccgtttgccacaccggttatgagaaagcggattactcggatcgttctttcgtaacgcgcatggacaacctgggtaatcccgatgttctcctggtctttggcggtacgaacgacagttgggcgaaggcccctattggaagctaccagtatgcagactggactaaagccgatctttacagcttccgtcctgccttctgccgactgatggactatctgactaaacgctatccggatacccgaatctataatatcacgaacaccgaactgtcggaagatgtaattaactctatggatgaaatctgccgccattatggagtaaccaatatccacctgcgtgatattgacaaacagtggggacatccctccataaaaggaatgaagagtatttgcgaacaggtttgtaaagtactggaagaataacatataccccttccacaccgctgcgtccctttattcatcgggcatagcgtgtggaagggtgttttttgtggacttatctcgttacgatccgatcccggctgactccataatatcctgctgccggcacatatatcggttgtgtctttcttcctatattttctatctttccttccgcattcagccgtttcaggtgctccgctgctttcgaccgcataaagccgcatatacgctggaaatcggcacgtgtcatcagttggtgttctgcaaaatacgctttcagccgcatatctatctctacatcagatagtttaccggagtgcccgctgtgcctgaagtttttcagtttcacgttgcccacctcgtccttcagcgcacggtcggcacggaacttgatacctttcaatctcaccttttcatttttccggtccgtctccctcgtgattcctttttcacttttcagtgtggggtagaaataaccgataccatccaggtgtacttgccgcccttccgataattcctcgcccatcacatgagaaagcgcgtcgagcaccgccgacacatcagtttcagtcagcgagctgcgtttctgtatttttcggcggatttcgtcggttcctacttttccattgagggtgatgcgtgcatggattgttgttttctcagtttcgtccgtttcattgttcggtaccggagtctcataccattcaaaaagtattgccattgtttgtcgttttacaattgatgatgcaaatgtaccatatatataagggaagagcaaattttgaacggaccattcatatcgtttgattatagtcggcaggctggctgattgcaatcaacaagcttgctgacagtaatcagtaagcctgccgactataatcaaacgctgcggatgccttatgcaaaagacgatgatcccatatgtgaaatcacaacaagatatacctgctttattagtgctgattagttgaacggatttctctaaaacgtttgcaaacaggccttttatgatgctaacttcgtagcattaatcactaaaatagtaacagaattatgaagacaaaattaatgcgatttattacctctttttttgagagttggagagaagaaaaaaaagtgctggcaaatcagccggaatctattgtggagcacacggatattaccgttgtgcgttccacaaaccatcttgttgcggaacgtgtaaagaccgtgccggttagtctgacggatcaggtaaaccgcttcctgcaatctacctacgattttcgttataatttgctgacggaagaaaccgaataccgtccggcagatgggagaggagagccttttgcacctgtgggcaggcgggaactgaattctttctgcctcgaagcgcatgcacggggcattgcctgttgggataaagacatcagtcgttatctttattctaccagtgtacccggttatcatcctttccttctgtatctggacgaacttccggcctgggatggcattgatcgtcttgaagcattggcgcaccgtgtttcttctgatccattgtggataaaacacttccatatatggttgcttgctcttactgcacaatggttgggcataacgggaaagcatgccaacagtgtggctcctatccttatcagtacggaacaaggctgtttgaaatctaccttttgcaagagtttaatgcccgaaaccctgtcacgttactattcggatgaagtggagttgacttcaaagggaaacgtcgcccgtaaaatgtcggaaatgggtctgctgaatcttgacgagttcgataaatatcccgcttctaaaatgccgttgctgaagaatctgatgcagatggcggagctgaacctttgtaaagcctatcagagaaactatcgtaacctgccgcgtatcgcctctttcataggcacaagcaaccgttccgatttattatccgatcctacggggagccggcgttttctttgtgtggaagtgaaggggaagatagattgttcccgcattgtgcacaaacaaatctatgcccagttgaagcaagagcttctgaagggtgcccgatattggtttacggcagaagaagaacatgaattgaaggagcataataagatgtttcagcgtcgcagcataatggaagaggtgctttatgcctgtttccgccctgccacagccgaagatcgggatgaaatagtgcaacgcctttccgcggcagacattttcaaggttttgaaaagacagaatccagccgccatgcggggagttaattcgaatgcgtttgcccagttgttggcgccattgggattttcccgctcacgtagccgttatgggaattattatgcggtcatttctttgtccgaaaatatcccttccacccgctaaccccgatgaatcgggcgtttcaatagtgtggaagggtagggatactcgctatgaatatggtaaaagctggtttgactgaggaaaacaagaatagatgctcaacggtttttagagaatcttttttgatgaaattcgaaacaaatgaatgcttttgttgttgaatgtgaaaaaaaacgtatctttgcaactgaacacgtgacatgtgatatctttcatggtttacatgtcctcttccggtaccagtaaaatgtggaaatttgactaaaaaaccggatgagcgtagcctgtatcagtcttggtacgggcttactcttcctgtttttagaggtatccacatacctactggtagggaagaagtaagaccccgtacttttataatataaaccattatagccgtatagggttgatttgaaactatttaatcaaacactatatggctaattggctttctatacaagcagctgccgaaaaatacggcgtaactgagggggtaatccgtgaatggattcggctcaattatttgacaatttcttctttaaagagggatccttttgaagatctggatccgctggtggatgctgacgaactcgatagagctcttgagttaaaatcgatgcaatcctatcctgacgatgaaactattgagcgaattccgagagggcatttagattggatttatcaggagaattcccgattggcaaaaaagaatgatgatttgcgggaagagaattatttgcatgttcagtgggaggctaagctaaaagctgatttagataaaatgatagagcttaccgagcgtttgaactcattgcaccagaaaatagcggaagactataagtctacgctcagtagccgatttgatatttggtcttctttctggcatttactcttctctaaaaagaaataaagacctaacttgataactaatacctcacctaaccagtatatattgttttttttaatccttttcatcttgtgagtacggagttccgtgaggagctccgtctcttttttgtataccctccctttctatttctatccatttctcctcctcctgggagtaggagtatcccgtaggggggaggtgtagatgagttaatctacctccctatacgcgcacgtatatataataatgtatccccttccccctcctttcattctccctttcaaacttatgttctacaacatccttatcaatcagccatttacgaaattgtttcaaaaaagtttcgaaaaaaagacagatatgtttggagtgaatagatatatcggctacttttgcacccgctaaccaagagacggtcagccttgaaattgacattctgacagaaacggcgtaggaactccaacgtttttctttccttttaggctttattctaactaggatacagcattctaaaagaaaaaagaaaaaaacttccggaaacatttggaagatatgcttaaaagttcttacctttgcacccgctttccgagaagaggctgacgctgagtcggcttccctgatagaggcggcgctaagaacttcttcttcttttatctccctttcgcaaagagagacgacgagaaaaagaaaaaagaaaaaaaactttcgaaattatttggaagatatacttaaaagttcttacctttgcatccgctttctgaaaagaaaagcagttttaaaaagaagcgatctttgaagaatttacataaacaatacaagtagtacaagagcaggtgcttcgcaaattaataattgaaaattaataattaaagcgcggcatctgggtataaaaaagaaccgtcaagtaacttatatatataggtaatttgaagacttttaataaaccgagcgtcctgaacagagcaaaaacactgtcgctttttaataattaattattaatttgcgcagtcacaatacttttacaatgaagagtttgatcctggctcaggatgaacgctagctacaggcttaacacatgcaagtcgaggggcagcatgacctagcaataggttgatggcgaccggcgcacgggtgagtaacacgtatccaacctaccggttattccgggatagcctttcgaaagaaagattaataccggatagtataacgagaaggcatctttttgttattaaagaatttcgataaccgatggggatgcgttccattagtttgttggcggggtaacggcccaccaagacatcgatggataggggttctgagaggaaggtcccccacattggaactgagacacggtccaaactcctacgggaggcagcagtgaggaatattggtcaatggacgagagtctgaaccagccaagtagcgtgaaggatgactgccctatgggttgtaaacttcttttatatgggaataaagtgagccacgtgtggctttttgtatgtaccatacgaataaggatcggctaactccgtgccagcagccgcggtaatacggaggatccgagcgttatccggatttattgggtttaaagggagcgtaggcggactattaagtcagctgtgaaagtttgcggctcaaccgtaaaattgcagttgatactggtcgtcttgagtgcagtagaggtaggcggaattcgtggtgtagcggtgaaatgcttagatatcacgaagaactccgattgcgaaggcagcttactggactgtaactgacgctgatgctcgaaagtgtgggtatcaaacaggattagataccctggtagtccacacagtaaacgatgaatactcgctgtttgcgatatacagcaagcggccaagcgaaagcattaagtattccacctggggagtacgccggcaacggtgaaactcaaaggaattgacgggggcccgcacaagcggaggaacatgtggtttaattcgatgatacgcgaggaaccttacccgggcttaaattgcatctgaataatttggaaacagattagccgtaaggcagatgtgaaggtgctgcatggttgtcgtcagctcgtgccgtgaggtgtcggcttaagtgccataacgagcgcaacccttatctttagttactaacaggtcatgctgaggactctagagagactgccgtcgtaagatgtgaggaaggtggggatgacgtcaaatcagcacggcccttacgtccggggctacacacgtgttacaatggggggtacagaaggcagctacacagcgatgtgatgctaatcccaaaagcctctctcagttcggattggagtctgcaacccgactccatgaagctggattcgctagtaatcgcgcatcagccacggcgcggtgaatacgttcccgggccttgtacacaccgcccgtcaagccatgaaagccgggggtacctgaagtccgtaaccgtaaggagcggcctagggtaaaactggtaattggggctaagtcgtaacaaggtagccgtaccggaaggtgcggctggaacacctcctttctggagcgacgctcagtcaaaatgagagattttgaaattaataattaacaattataaattaaaaactctctgtactaacaaattaaaagttggttcttttgacatgctacataagaacctcttgcactacgcgtagttgtttatataatatatattgagaaagaagaagccgagccgcaaggcgaggttgaactcgacagtcctatagctcagttggttagagcgctacactgataatgtagaggtcggcagttcaactctgcctgggactacttcttaaattaaaaattataaattataaattaaaacgcgatgtcgtaaatttaattttaaattttaagtttttaattaatgaagggggattagctcagctggctagagcacctgctttgcacgcagggggtcaacggttcgaatccgttattctccactctgataacaaatttaattattaatttgttaatcaaccgttctttgacatgatgtacaaaaaaagtaaagttataacaagctgaaagtatatatcgagccatacggctaggtaagactaaaagtaagtaagggcgcatggcggatgccttggctctcggaggcgatgaaggacgtgataagctgcgataagctgcgggtaggtgcaaatgacctttgatccgcggatttccgaatgggacaacccaatatcttgaagagatattatccatcttacgatggaggcgaacgcagggaactgaaacatcttagtacctgtaggaatagaaaataaataatgattccccaagtagtggcgagcgaacggggaatagcccaaaccatatgtgttacggcatgtatggggttgtaggaccacgtcgtgggacgaaagttagtgagtagaatgatctggaaagttcagtcatagacggtgataacccggtatactaagctaactgaaccctagtggtatcctgagtagcgcgggacacgaggaatcttgcgtgaatctgccgggaccatccggtaaggctaaatactcccgagagaccgatagcgaaccagtactgtgaaggaaaggtgaaaagcacttcgaacagaagagtgaaatagtccctgaaaccatgcgcctacaagcggtcggagcagtttaaactgtgacggcgtgccttttgcataatgaacctacgagttactttttccggcaaggttaaggatcttgagatctgcagccgaagcgaaagcgagtcttaatagggcggatagtcggaaggagtagacgcgaaaccaagtgatctacccttggccaggttgaaggacaggtaacactgtctggaggaccgaaccgataagcgttgaaaagcttccggatgagctgagggtgggggtgaaaggctaatcaaacttggagatagctcgtactccccgaaatgcatttaggtgcagccttgatttatactaatatgaggtagagcgactgataagatgcgagggcttcgccgcctatcaagtcttgacaaactccgaatgcgtattagttctatatcaggagtgagggcatgggtgctaaggtccatgtcctaaaggagaacaatccggaccatcagctaaggtcccgaaataattgctaagttgatctaacgaagtcagattgctaagacagctaggatgttggcttggaagcagccattcatttaaagagtgcgtaacagctcactagtcgaggagtttggcgtggataataatcgggcataagcaatttaccgaagctatgggatgtgcaaacatcggtaggggagcattctactcagcgttgaaggtgaagcgtaagctttgctggagcgtgtagaaaagcaaatgtaggtataagtaacgataaagggggtgagaaaccccctcgccgaaagactaaggtttcctgatcaacgctaatcggatcagggttagtcgggtcctaaggctcagccgaacggtgaggccgatggcagaacaggttaatattcctgtactaccttaaagagtgacgtggagacggaggcgtgacagtgccgcgaactgacggaatagttcgttgaagggtgtagatgttgatcggggcaggcaaatccgctccgagagtcgaacctgatagtatggagcgttcttcggaacaatccaatagtgcatgtaagcatactcccaagaaaatccgctaaacttaatctttaaggtacccgtaccgtaaacggacacacgtagtcgggttgaatatactaaggcgcttgagtgattcacggttaaggaactaggcaaattgaccctgtaacttcgggataaagggtccccactgcgaggtggggcgcagagaatcggtccaggcaactgtttaacaaaaacacagggctatgccaaattgaaagatgaagtatatagcctgacacctgcccggtgctggaaggttaagaggagatgtcatcgcaagagaagcattgaattgaagccccagtaaacggcggccgtaactataacggtcctaaggtagcgaaattccttgtcgggtaagttccgacctgcacgaatggtgtaatgatctggacactgtctcaaccgtgagctcagtgaaattgtagtatcggtgaagatgccgattacccgcgatgggacgaaaagaccccgtgaacctttactatagcttaacattgaatttgggtaattgatgtgtaggataggccggaggctttgaagcaggtacgccagtatttgtggagccgctgttgaaatacggccctttggttatttgagttctaactcgccagtgcgaggacactgtttggtgggtagtttgactggggtggtcgcctccaaaaatgtaacggaggcttctaaaggtgccctcacgccgattggtaaccggcggcagagtgtaatggcataagggcgcttgactgggagacttacaagtcgatcaggtaggaaactagagcatagtgatccggtgtttctgtatggaaaggacatcgctcaaaggataaaaggtactccggggataacaggctgatccctcccaagagctcatatcgacggaggggtttggcacctcgatgtcggctcgtcacatcctggggctggagaaggtcccaagggttgggctgttcgcccattaaagtggcacgcgagctgggttcagaacgtcgtgagacagttcggtctctatctatcgtgggcgtatgaaatttgcgtggctctgacactagtacgagaggaccgtgttggactgacctctggtttaccagttgtgccgccaggtgcattgctgggtatctaagtcgggattggataagtgctgaaagcatctaagtacgaagccagccacaagattagatttcttagggtcgttgaagactacaacgttgataggatgcaggtgtacaggtggtaacatcatagccgagcattactaattgcccgttcacttttggtctttgccttgtatggcaggtatatacgttcagtttaaaatctttgcttttttgcatcatgtctaacttatttaggtgactatagcatcagggttccacctcttcccattccgaacagagaagttaagcctgatcacgccgatggtactgcgtcaagtgggagagtaggtagttgccgttttttagagagaagcctccatatcgaaatgatatggaggctttttgtgtttataggtataatatccctttgcttttcatttatatccccttcccgatacacgttttctttcagttcaatatcctccccagtttattctcttctatcttaattctcctcttaaagtaatcctactctttacattataattgcatatttatgataaaatgtatactgttgtattatcaatgtaatatagtatcccctaagtaataaacgaatgattaaaactacttaaaaccaggaaattatatcatatttttgctttcgtatttagtgctttattcgtacctttacttcgtattaaaaggtactataattcctttatttactgaacattattttttttattaaaagaaaattcgatttttataaaacaaaaaacagccattcgctgttgttactatagagttgaaagcgacatgagaacaactgtaaagacatttttggtatttgtgctacttatggtgacgtgtagtcttggtagcagagccgtcaactttacggggatggttgaaaaagctgcatctacttgtgaggtgagtgcttcttcatcatcattaaagaatgcttcttcggataatgtcgctaataatacaagaagcaacttatttacaaactccaagtttatgtggactacggatgctgaacttggaagcaaacctatctctgaaagatattcttttaatccttatcgtttccgcagagctgttgaaacagcgtctgtaatgagaggccttttgatgatttcttctcaccacaatttgttggtacatgaccagtctaaactatattattcagataaagatccgcattacacatccttcagtagtgaatactacatctacactttgcggcggattgtgatttaaacttcctttttatttagttttccccctttttcccctttacttctttcccgaaatatggctgaaagtaggtgaccttttacaaccctatgcttgggttgggttatacgggcgttagcggcatgttcatgctgtgaaggggaggattatatccatacgtctaatttttaaaaatcaattttaatacaaacccatttaaatttttcatcatggaaactattcaaaagaaatctgcctcttttaaaggcatcaagtccgccggttgggtaatcgtaatttgctttatcgttgccgtgcttatttttcactttgtgttgggaaacccctctaacttcatgaacaatgacccgaacaaccatccgctgccagggaacttcctcggtactatctacaaaggtggattcatcgttccggttattcagactctcttgctgaccgttattgcactgagtattgaacgctacatcgctattggtgctgctttcggtaaaggttcattggctaaattcgttgctaacatcaaagctgctttggctgccggtgatatgaagaaggctcaggaactttgtgacaatcaacgtggctctgtagccaatgtagtaaatgctactctgaagaagtatgctgaaatggagaatgacacgactcttgctaaagaccagaagttgcttgccatccagaaagagttggaagaagctactgctttggagctgccgatgatggaacagaacctgcctattatcggtactatcactactctgggtacattgatgggattgcttggtacggttatcggtatgatccgttcgtttgccgctctggctgccggaggttctgctgactctatggcattgtcacaaggtatttccgaggctttgattaatactgccttcggtatcttaaccggtgcattggccgttatctcttataactattataccaataagattgataagttaacttacagccttgatgaggttggtttctctatcgtgcagacatttgcagctacgcataaataaatcggtcgaacccttttaaaatactacaattatgggtagagcgaaaataaaaaagaaaagtacgttcatcgacatgaccgcgatgagtgacgtgactgtattgctgctgactttcttcatgctgacgtctacgttcgtgaagaaagagccggtacaggttaccactccggggtccgtatccgagattaagatcccggaaacgaatatcctgcaaatattggtcgatccggagggaaaagtatttatgagtctggacaaacagtctgacttgcgcgaggtgctggaagcaatggggcaagaatatggagtgactttcactccggaggaaactaagaaattctcattggcgtctactttcggggtgccaatgaagagtatgaagaagtacctcgatttgccgcaggatcagcaagacgctgtgttaaagaatgaggggatacctaccgacagtatcgataatcagttcaaagcctgggtgcgcaatgcccgtgctacgaacaaagatttacgtatcgccatcaaggcggatgccaatactccttattccgtaatcaagaatgtgatgaactcacttcaggacctcagagagaaccggtataacctgattacttctctgaagactacttctgaagactaacagaaaggaaatattatggctgaaatacaagaaagcggcaataagaaaaaaggcggaaaaaataagcaaaagaaaatgaccgtcagggtggactttacaccgatggtggacatgaacatgttgctgattaccttctttatgctttgtacttcactgagcaaacctcagactatggagataagcatgccgagcaatgataagaatgttactgaagagcagcagtctaaagtgaaggcatcacaggctatcacattgctgttgggaggtgacgataaattgtattattacgatggagagcccaactataaagattatagctcgctgaaggaaacaacctataaggcggatggtctgagagcaatgcttttgcaacgtaatagagctgctgtaaatgaagtgaacgaactgaaacagcagaaactgaatcttaagatatcagaagaagagtttacgaagaaattgggtgaaattaagagcggaaaggatactccgaccgtgattatcaaagccactgatgatgcttcgtacaagaatctgattgatgcactcgatgaaatgcagatatgtaatataggtaagtatgtgattacggacatcgctgaagccgatgagttcttgataaagaactacgatagcaaaggtgaattgtcgcagaatcttgccgaataatgtgtaacacctaaaaaagtaagaatatggctaaagtagatttaagttcttcggaatggtgtgacctgatattcagtggcaagaataaggcatacggcgcctatcagttaagagagaaatctccgaagcgtcataatattgctgtgatactggtgattgtcattgcattgatagggttcagtatccctactttgataaagatggctacgccgaagcagaaggaagtgatgactgaggtgactaccttgtctcaattggaagaaccggaaattaaacaggaagaaatgaaaagagtggagcccgttgctcccccgcctcctgcactgaagagttctatcaaattcacggctcccgtcatcaagaaagacgaggaagtgagagatgaggatgagattaagagccagcaggaactgacagaaacaaaagtggctatttctatcgctgacgtgaaaggtaacgacgaagaacatggtaaggatattgccgatctgaaacaagtggttacccaagctgaaccggaacctgaaaaggttttcgatatggtagaacaaatgcctcagttccctggtggacaggctgagatgatgcagttcatcagcaagaatatgaagtatccgactattgcccaggaaaacggaacgcagggacgtgtgacttgccagtttgtagtaggtgcggatggtcgtgtacgtgatgtgaatgtgctgagaggtgtagacccttacctagacaaagaagctgtccgtgtgattatgtccatgcctaagtggattcccggtaaacagaatggtaaagctgtatcggtgaagtatacaattccggtagtgtttaggttacaataataatgtgtgtgtcatgaaaacggtgaaacaacttcaacttttgagtttggcagtgatgctgcttgcagtgtctgcctgccaaagtaagcctaaggacgggctgacggatacgtacacttcgggtgtgatagcaattgctgcggacgaaagtttccagcctatcgtacaggaggaggtggatgtatttgaaggactgtttcctctggcaggaattgtgccccgttatgtgacggaagtagaagccgtcaatctattgctcaaggacagtctgcgattggctataaccagtcgcagactgacaccggaggagatgaactctttcaatagccggaagttcttcccgcaggagataaagattgctacggatgggctagcgttgattacgaacagggagaatcctgatacgttgatcaccgtgaacgaaattcgcagcatcctgacgggaaaggttacacaatggaaggaaatttatccggcatcccggctgaaggatatccgcctggtatttgacaataaaaactccagtaccgtgcggtttgcggtggattccatttgtaagggtgctccgttatcggaccaggtgaaagcattgaaaaccaacagagaggtcatcgactttgtgtcaaagactcctgatgctatcggtattatcggcgtgaattggctgagcgaccgtaatgacagcacagggctctccttcagcaaagaagtacgtgtgatgtccgtcagcgcagccgacaaggcgacgccggaaaacagtttcaaaccctatcaggcatatttgttttacggtgattatccgttggcacgcaacatctatgccctgttaaacgatccgcgaagcgcgcttccgtggggatttgcctccttccttgcttccgaccggggacagcggattattttaaagtcgggattagtacccgctacccaacaggtacgggtggtgaatataaaagataaataactaaaatgagtgctattatgaaaacgatgttagttcttagtatgggagcgttgctgttggccggcacactttccgcacaaacgcctgtacccgaatggcaggctggggtagataaagtaaaaaacttgattcagtccaatcccgcgcaagcttctgaggaggctggggagttactgaaagggaagaataaaaagaatgtggatcttgtgacttccgtagcccatgtttatctggacgccggaaagatcaccgaagctcaggaatatctggctatggcaaagaaagccaataacaaagatcccaaagtgtctgtattggagggtgatattgcccttgcacaaaagaatattggacaagcttgccaactttatgagcaagccatctatttcgatccgaattgcaaggaagcctacctgaagtatgcgcaggcttataagtctgccagccctacacaggccattgaaaagttggagcagctcaaagctgtagatccgaactgtctggaagctgacagggaattggctgaggtatattattccggcaatcgttttggcaaagctgccgagatgtatgcgaaattcatcgacacgcctcttgctacggaagatgatatgctgaaatatgcttttgccctattcctgaatcatgatttcgagaaatcattgcaggttgcacagaaaggtttgcagaagaatgcacgccacgctgctttcaaccgccttgtcatgtataacaatacggacctgaaacgctatgaagatgccgagaaggctgccgatgctttcttcaatgcttcggaccgtgcagactattcttatttagattaccgctattatggcgctttactgagtgcattgaagaaatatgataaagctattatagaatatggcaaggcattggataaagatgatacacaagtggacttgtggcgtgaaatatccgatgcccatgaaatgaacaataattatgcagaggctattgctgcttaccgcaaatattacgatgcattagccaaagaaaagaagactcctgaaacattattccagttaggacgtctttattacggacagggcacatcttcggattcgctcgccgtgcagcctgccgaccgtaaactggcattgcagtctgctgactctgtgttcacccttgtttccgaacaagctcccgacagttatctgggagaaatgtggcgtgcccggaccaattctgccatggaccccgaaactactgacgggctggcgaaaccttattacgaaaaggtaatggacatgctactgagtaaaaatgaaccgaagtataactctgcgttgatagagtgctacagttatctgggctactactatctgttaaagagcgactatcctacttcgaaagagttctggaataaaattctggctatagaccccaccaatgctactgccaaaaaggcgttggaaggcatcaaatagcaacaattttagttgtttgtcgtgtcgggaggagtggagagtgattcttagctcctcctttttttatgtttttttccgtaaacgcttggattattaaaaagattatctacctttgtggtgtactaataaactaatacactaatattgaaattaacaaggtatcagatactagttgacaaggccttctccttgtatcttgtttccttgccacctataaaaacatataagtatgctacaggtagaaaacatttcgttcagttatcgtcggggtaaaaaagaagtcctgcacgatttttcgctctcgttagagaggggtagggtatacgggttactgggaaagaacggtgccggcaaatctacactgctttatctgatgagcggtttgcttactcctaagagtgggaaaataatgtatcatgataccgatgtacgccgtcggttgccaatcacactacaggatatgttcctggttcccgaagaatttgaattacctcctatatctttagtcagctacgtggagttgaacagtcagttctatccccgtttcagtaaggaagacatggtaaaatacctgcattatttcgaaatggagcaggatattgacctgggagccttgtcgatggggcagaagaagaaagtctttatgagctttgcattggctacccacacctcactgctgattatggacgaaccgaccaatggtcttgatattccgggtaagagccagttccgtaaatttatagcttcgggcatgtcggacgacagaaccattattatctctacccaccaggtgcgggatattgataagatactggatcatgtggtgattatggataacagtaatgttttgcttgacgcatccactgccaacatctgtagtaagtttcttttcgttgaaagcgatgaccgcgaattggcagaagcagcgatttacacgcttccttccatacagggcaatttcctgatgttgccgaatacggatgatgaagagtcggagatcaatcttgaattgttgttcggtgccgcgcttacggaccctgagaagataaaaggaatgtttcaccctaaacagaatgaacaatgatacgcgataccttttttagtgcgccccgttttgtgaacttatgtcgcaaagaaatggtggagagttggaaggcaaatttgctccgcttcgtaatgatgtacggtataatggcaattgctttcgtatggaacggatattttcggtacaattatcctcaaggaatgattgacagaggggtggagcaagatcctatctggtactttgaattgactatttttctttgggctatggttattatgggtttactgagtgcttcgttcattatggaacggatgaagactaaaaccaaccgaatagcagtgttgatgacacctgcaacgatgtttgagaagtttctctctcgctggttggtatttactttcggttttctcattgtgttcctgattgcttttaaattggctgactggacacgtgtgatgatctacatggtaagttacccggaattgaaaggtgttattgcttccgctccgctttcctatttggggaattccggatactattggacaggtctccaaacttgggatggtcttctgatggcattaagcggatacttttttgctcagtctatatttgtattgggtagcagtatctggccaagaaattcatttgttaagacattctcagctgtcattgttatcatcatagtttatgtagcaatagggtcgctattagcgaaaatcttgtttgaaggacgtggtggttatggagtacatcaaacgatgtcggatgaagctatgatgcatctgtcaacagccgtctttttcgcaatggctgtctttaactggatagttgcctatttccgtttcaaagagtctgaaatcattaaccgctggtaagtatgaattttaaagaaagtaaagccatctatcttcaaatagcagatcgcatttgtgacgaagtgcttctcgggcaatatcgggaagaggagcgcataccatccgtcagagaatatgcagctgtggtagaggtgaacgctaatacggtgatgcgctcgtacgattatctgcaatcgcaggaagttatctataacaaacgtggtatcggttatttcgtcgcttccggtgctcgtgcgttaatcctttcattgcgtaaagagtattttctcaaagaagaagtagattatttcttcaagcagatgtatacccttggtatttcggcagaagacatgtcggctatgtaccgggaatttagtaagaaacaaaaataaagaagaagattatgaaacgaacaacttatataatatttggaatgttgcttaccggattggttgtggtgtgcgctggcatattctacgcctctacgcaagttacaggttgggataatattttcctggatattaaaggagaaaagaagactgttcaattaccgcagtgcagagttatacagatggtggcggttagaaatatcatcgctacgggtgagggcgaagaaaagggaataagaatgccggcatttggagagcttcctttgaaaattacttctggtgaagctggacaaggatctttcacttatgcttccggtatggatgaatttatgacgatgaattcagttggagatacgttacgtatcgtatttgattttcctaatgataagcttgaaaagaaatatcaggacttgtattggcttaatttacgttccgaggagatgattatagctttgccggatcatgtccagttcttgcagaccagtcttgaagcccagaaaatgactattgaaggtttggcccgtgattcattgtctttgatggtacaagattatgctaccataaacgactgcaactttagagctttaacagtccagaatggtgcgtggttgtttaataccggtaaagcggataatttgcatctgcatctgaacgggatacgtagttggaacgtgaacgcaagttctttccatgttgatacggagtatctgtatgctcatggtgatcaaagatgtactttggagaatggcgaatgtcgtcaggtagtttggatgcctcaatctaaagacgcttcattggatataaaactgaaggaagctgcaacagtagttgtgaaataataataggtattgtcaggatacgaaaaaagaccgttttcaacggtcttttttatttagttgcggagatccgaccttatatgtaaacttacattattcggcatatctgaatatcaatctaatacgctttctgattcagttgtttttatagggtatttgtccgaaatctgtccgaggataaatctcgtaatgtgatttttactgctcttttttatttggtacaatcatctaatatttggatataatatattctattttcccaaatctgatccgcttgcaatggcacatattacattgtctttctcggggacatgttttttaatttctttgatctgttcttgaagtttacctatttcgcgatttaattcttcatttcttatttttaattctttattttcttcttttaaatgctgaaaaagggcgtctgtaggttcaggagttatgaacttttctccttttccagtgataagccacataatattgacttgaggatatatgattaatatatcattcaatacgcctgaagttatatcattgtttagacttgtcacataggttgatgtacggcctatgctgatggaaaactcacgtcgtgatagctctaatgcctcgcaaagagcaattaatctatctcgaacagccgatgatttttgttttgtacccataataaaagttaatcgaactatatataattcacatttcatttgtttttaaactatatattgttcatatttgcattgtattttaaatcacacgaaacaaatgtacaaagaaatcgaaacccctgcaatagcgaaaaaacgctattactttaaaaaaggctatcgtcaagtgactatagcccagaaagatgaagttcgcaagaacttgatgcatgcattaggcattacacgttacacttacttttcgcacttacttaatagtggtattgtggatatcactatgtcgaagtatgaagtaatcactgacattctccagagatatggagtggttgatatttgggagattgttcctgaagatcaaaatatacgatgatatggctgcattgtcgaatagagaaatacaaatcgcggaacgtatagcttggggggcttcccaaaaagaagttgctgatgatcttggtatttctcgctataccgtggataatattcttcgtaagatatatcaaaaacttcatatcggtaagataaatgagctgtctgcatggtggttttgcacgcacttcaacattagctttgagctatcacctttaaagcgtgccattggtgcagtggctttggttgttttgataatctttaatgattttatttcagatggttcctattgtcgtagtcgaggacggaaagtaaaaacggaggagttggtgcgcttgaaagaagtagcttaattatttctttaatacatgggtgataagttaataactaaagaaatatgagcaaatatacagcaaagcaaatagctgaatctgacgaactgtttgaaaagcaaatacataaagtcagaaaattttatttgagccgtaatcccgataaaatgatgatgcttgaagaaagaaaagccgtcattaaagaacgaaataaaggtctttccccggaatatgacaaggagtattattgtggaacttgtggagctaaagacggtgcggaacatcctaaaagcggatattgcttttactgtgatactgataattggatttcaaagaataactaataactaattaacaatgaatcaaatggatataaaattaagcaagatgcagtttattcatttagaacatatctgcaaaaaaggatggggtggttatagcaaaccatccgatgaattagacaaaatggtagaaaacggtttattgacaaaatcggctggaccattcggagatgttgtttatcgtccaactaacaagggatatgagttaataaattcctaataaaattattgaaaatatcatgactacatcattaattcaatttcacaaaacagataatgtctgtcattatgaactaactcaagaaggtaaaaaatgccagttcctccagttcttgattaataccagtaacttcacttggcgcaaaataccggaagaaatcactgaagaagacaaacggcaagaagcctctatcctattgagcaaactttgtgctattgggtacttgatttttcagaaaaagagaccggatgtttcgcgtgcagtcattgcaaccgattacatgaacaaagaacccggacggagtgggaaaaccttatttgtgaatttcatagccaagttcattcaagcagaacacataactggtagattcatcgatataaataatgcttttatttggaatgacctatcctcacagaccaaactcgttgtgcttgatgatctaccggaaaactttgaatttgattggttatttccatgtattaatggagactgggtgatcaatagaaaaggaaaacaagtagatatgatcccttattcatattctcccaaaatagttatcacaactttctcggagatagctggcaaaggagttagtgtcgattataggaaatgggaacttcccttttctgattattacaatgccagccatagccccattgatgatttcggaaaatgtttcttcacagactgggatatcgaagactggaagtatgcttatatgttgatcgctgactgcgtacaactttatttgaattatggacctgtgttaacccaggaaattctatgggaaagtaaaatagaagtcgaaatagggatggattttacttcttgggcagacaactatttttcaaatccttcatatctaaatcagaccatctccagaagaaagctatatgaactattctataaagaggataatgcgagacgtaaatatgtctcatatacagttttcaaatacaagttggctaaatattgcaatgcaaaaaagatagcttttagcacacaaatttcaaatggaactgagttgttttctttttcaaaagtataataaatcatatatgaaaaagcagtatgttatagcacgttattttcgaggttggcacgtggaaacaatgtgccaacctacaacaaagagggatgctgataaacgatgtgctaaactacaaaaaaaagcgtccccattgactgaatacaaggtgctcaaaattgccactacggataaaaaagtgacttacatttaacgtataacaaatgggaaaaagaacaatgcaaatagatgtaataggttcagtggaaggtactggatttatgaaatgcaaattgtatgccgatgggcgtgtatgtgtattctacatgacggagtctaactataaagccttgatgtatgataaaatatttattcgtgatggtcaaactattgattcagcaggagttataaatacgaccaacacttttattgaagaagatttatgaatgtttgaggaataccggctttgggatttaacttcgggtgttcctgaattatttctctaaattcaaagggaaacaaaattatacgattaagcagctaataggtgattaacttttatatatagggcaattatggcagaagacaatcttgcactcgatatccctatcgagatcttattcaaatacctgctcaaagattatcacagagagcaacagcgcaccctgtatctggagaggcaaatcaaaagtgtgctgaagcggaatgcttacctggaacaggaaatcggcaaggtgaaacagcagctactgaagaagatagaaaggagtgagaaacaaattgattattcgcaagaaatcagccggctacaccaggctgtttcctgccggaacaataccattgagcaactcagaaatgagaatgcccggctgaaaaatgaactcgatacgtatatgctgtttcttggcaaaatttaagtcctatcacttaatcctaaaaacagtgtaattcgtagcggcaacatataaaactcttatgtactttactaaagatgatataaaacggatcaaggaagcttccaaagggaagctccttgatattatcggtgactttcacgaactacggaaacggggcgctgaatataagtgcgaatgtcccaaatgccacggacaggagaagctacatatttctccggccaaacagattttcaaatgcttcagttgcccggatataaagggtaaggaaccgctggactatttgcagagggcggaagatatgcaatttctggaagccctcgaccacctggcacgcaagttcaatgtactgcttgatccaaaaccggagaaaaagccagccaagcctgctaaaatgaagaaacaaagcaaggaggccaaaggagaaagcattgatacattctgcgcccgtatgcttgccggtagcggactgacctatcaggatgtaacggcacatatctttaaaaaaggagatacacagagtatttttgaggcaaaaactttccgtccgggaaccattgacgaatacggcaatatcgttgatggagatgatgtcatcatcgaatattacgatctggatggtatgccggttacctatatgcgtaaattaccggggcgtggcaagcaggaacccaaggtgtattatcgggtccgctggcagttcccggacgaacatcgggacaaggaagggaaaccgttcaaatacaaatctcctgccggcagcggtacgcccatatacattccggaacgcatgaggcagatgtacaaaaagaaagagcaatttccgagactctacatccaggaaggggaaaaaaaagcggagaaggcttgcaaacacggtattccctcaatagcggttagcggtattcagaacctggggcagaaaggggcattgccggaagatctcgtcaagattatcaccgtttgcggggtcaaggaagtggccttcatctttgattcggactggaatgatctgtccaacaatataaagtttaatactcctgttgatacacgtccgcggtgtttcttcgccgctgcccgaaatttcaaagaatatatgcggatgctgaagaaccgcggcatcatggtggaaatattcattggccacatcaataaaaacgatgaaggtgacaagggattggatgatctgttggcaaacaaactgagcggccatgaagaagaacttgccaaggatctggaatttgcctgcaatgagaaatccggaatcggcaagtatgtagaaatatttaaaattacggcatggaacgatcagaaaatacgtgagttatggaatctgcatagccacgaaaaatttgccgagcaacaccgcgaagttttacaggaacttccggagtttatctttggccggtatgcctataagtttgacgaaagcggcagggtggtatccgcactaccctatgatgaagatgaaaaattctggaatgaagattttaaggaaacgaacggtaacagaataccggtgtttgaatacgactatgtggccgccaaaaccttttttcaaaaccgggggatcgggcgatatcgtttgctcgatacgaagttgtggacctacattcatctggatccgccagtagtccggactattgacgtagaagatgcacgcgatttcatgttcgcctttgccgaacagaattgcagccgcttcgtcaataatcagttactcaagggaggctcgcaatatgtcggaccatttcagatgtcaaggcttgcttttatccaacccaattttatatccccgtcccgtgatgaacaatacttctatttccgtgaccgctgctggcatatcacacaacatgaagtcaaagaagtgggctacgaaagtattactcaccagatatgggaagaacagcggaaaaacaccgatgccaaatacctcgggcatcccctcattgccttcagagaaaaagacggcaaatatgattatgaactctctccggaaggaaagaaatgtcattatctgcaattcctgatcaataccagtaattttacctggagaaaaaagcctgaagagattgaagaagacgaactttatgaaaacaacctccacttgctcagtaaaatgtgtgctattggctatatgctgatggagtgcaaggacgcgaacgtgacacgtgccgttatcggcatggacggcaagcagtcggaagtgggcgacagtaacggccgtagcggtaaatcgcttgttggcgaattaatgcgccaggtagtcgatacagtctatatatccggaaaacggacggatatcttcaatgacagtttcatttggaatgacattgatgaacagacccgtctggtgtttattgatgatgtcatgcagaatttcaattttgagtttctgtttcctaaccttaccggtgactggactgtaaacaagaaaggaggatcgcgtatcacctatcctttcgcaaagtctcccaaagtatatattccaacgaaccatgctatccgtggcacgggttccagttatactgatcggcaatggctgatagctttttccgatttttataatgatcagcataaacccatggatgatttcggggtattattcttttccgaatgggacttcatgcagtggaacctgacctggaatatgttggccaactgcatacagctttacttgaaatttggagttgtacaggcaccgggcgaacgcttgcagcaacgtaaactcagacaggaaattggcgaaactcttatatcctgggcggatgaatattttagtagcgaagaaaaccaccgccgtactccccgtaaggagatttacgacaatttctgtaactatgatccgcagcaacgcaagtttataagtgctacggcatttaaagacaaactgaagaaatattgcgaatggaaaggctgggtattcaacccgcataagtatgacgcaaaaagcggtttacccctcttcctggataaagacggaaagccggttatagatgacaaatccggaggaattgaatactttaccataggaaaagcagctggcgaactggcaccgcagagtgatcttcctgaagcatcaactaataagcttgcattctgatgaacgatacacattccgatattatagcccggcttatgcctctctatgagatggcacctgagcgtttcatggcgttctatgatgcagtatatctgatgtgtattgacttgccggaaggtgaacagttccgtatttcagatcgttgtcaggaaaaagacctgaagctgtttcaggatatcgtaaaaatactcattgcggaacaaccatacgatgtgcatacaggacagttggagttgtcggatgatgtggagtacgtgagacggacaacgggctttagcccctctgtaaatcgcttcactccgagacgggaaaaggagtagattatgccaatttactacgatgtaaagatacatattttcaatgaattacgcaagaaatcatgctaaaaaaagagcataaaatattggtggtcgtttcaccggatccggtcgaacgcaagcagctgttgagtcgcctggtagtacggcttggctttgcccgcattccttcagatgcggcaaaaatcatatcgaatgatatcttcagtatagacctggcaacggcctatttcgttttctgtagtaattataattttcgtggggccgtactcactaaccaacgtttatatgaaatggctgcacggggcctgtgtgtagttgtaggagtccgttcaattccccgtgagtacgagttcatttgcagagtattctatccggaggaccttccataacagaagtattcttttgatgattaccggtcattccgagaaaacataacacggagtattcttaaaagtacatattgagtgtttgcctgcatccggcggtacgtgagtacagtcggatgctatcttttctttcttttgccccttccccctttcccccaacccattacaacaacgatttgaacaaacgtgcatgagcgacagtcgtaggaactgccggagggggtatattattcttttttttattcttctttttaaaaagagactaccttaaaaaacagaaaaaaaatcgtgcattcgtgcagaagtactgttgttttcttatatcaatttgatatgcaacaaattacaggcgcacaaaatccgcacgaattgcgcacaaatagcgcacgaattgtactttttcgggaaaaaggccgaaaagtacgcaaacggaagaattagtgcgggaatgtacgatttttgtgcgggtataatctattgatatacaggtgtgtataaatgtgtacatgtacaaaagtactgccgcacgaattttatactatatccgtgcaaggacttggttatatgctcggtatttagtatatttgtgtaaaaatcaacactttaaatgataaagaaagaccgatttgtctgttggctgccttgcaaaccatatgttaagcagttccttttgcataatttcaatacgcctgatgatacctggactgaaatcgttaacctgtcttccgacaaggagttgcagaacgatttcctttcacggctatctaagcctggacgctacgagaacaaataccgtaacctctaccgctatacggccaatgtagcggtagagatacgccgtgatgacttctaccgttatggctggtcgatgtcgaacaccgaagtggtggcgttcggtaccaagattgaacggcggatcaaacagatactgtttctgtatcttgatacccatgtgagtatgggacttccactatcagctgccatccgcaatttccagacgaagttcggatttactgaagacacctggtcttatgacaccatccgtagggagtataaccgacacggatatcggaagacagtggagaatacaacgatttttgattttattaaccgtattatattggggaagttgtccgagtttgggacaatttcccagcaaggaagattagcgtatgaaagtgataaactatgattttgaaaatgtcggcgggctgttgcagataattgccgttcccccgacctcgtttttgcggatccgtaaggattacaatgccggtctgaactacctggagcttcgcgaccgggagaatattatttccattccggtgtatgccaatgacacttatatatataatgaggacaaggaagtgaatgatgcgggggattgctggaatgtttccattgaaggggtgattcctaaactttcctcagtgaataatcagctgatggagacgctggagcgtggcttgtggtatgtgctggcagtggacggtaacggccaagtccactggtgcggtcaagaagacgcacttatgttattcgccacgaacaagacaagcgggcgttccgtttcagaacggaacggcacgtcttttacattcacctgcgtacaggatgaacccaccatttatatatccggattggaagaactggaagcgtaaaaacaacgcttattccctgtttgacggtgccctgtgtccttgggtaccgttttttttgcgcttttctttgcgcaaaaaagttatatgaacgagacagttatcacattattcggcagtattgaccggtattgttacaacaaaaattatctgaagtactatttagataaggcaaaaggccaacccgtccgcctgaaagtctcaagctttggcggtgatgtggccgaagcggtcgccatggcaaaccttatggctgagcatggcaatgtgacggtggaatttatcagcttcaatgcttcggcggctaccatactggcgttcggtggcaagtccattgagatgcatgaggacggtatgtggctggcgcataagtgcagcctgggcgtggacatttggggacagcttaatgctgatcagctcgaagacaccattaaagaactacaaaacaagaagaagagtgccgaggcgattgacttgatgattgcacagaagtacatcaaccgcagcggcaagagtctgaaggacgttatcacccttatggaagaagaacgctggatgcctgccgctgaagtcaaggaatggggcttcatagacaggatcattcccggtgtgcataaaaagcctcaggtgaccaatgaaataaccgactgctttactgccatcggtttaccgttaccggtactcaatgcttccgaatcggaaacgcaacccaaaggcaatgacagaaaccttgtttctcaaatcattgacggtatcaaaagcctgtttcctgccaataatacctctgaagacatttctaattcaaatacagttatttccatgcgtaaagaatttactttcattaatcagatcctcaattgtgaaggcattgaggaaaaagacggtaagatatcgcttaccgtagagaacttgcaggccatcaataacgccatcaaggtagccaatgaagcgaaaaccaaagctgaaagcgatttgacagccgccaatacagccagacagacggctgaaaacaatctgacggcagttgtcaacgaccttgacagcctgagcgatagcgtcaggaatgcggccgacaacaaggctaaggtacaggttatccgcaatatcgtggccaagattcccggaacggcaaccgccagtcatcaggaatcgaacgaggacagcaagtttgccgatatcgctacggatccgatcaacagttatgagaatgaataacatctaaactattctatttatggattttaaagcacctattgacattaccacggttctgaccgcggtaaaaaaacacagagacatcctgaaggcggtcgataagctcgacgcttcggaggtattgaaacatttcactccggtaccgggtattaccgattcccttgaattgggcaaggtagaaggcggcagcatctccagcaagtacaccggcaagtttacagccggcaagtatctgggtaagattgttccgcgtcgtctggtcgttcgtcccgtcgtgatggagatgtccgatgagccggaacgttaccgccgcacctacattgctgaggtacccggtacgctccgcaaagaacatcccttcgagttgtggctgatcaaccacggccatgaactggcatccaatgatttgctgtttgctcttttcacagcgaaatacagcgctgatgagaacaagacggacattcaggactctttcgacggtatcggtaccattgttaccgaaggcgaggcagtcggagatatctccagtgctgaaggcaacgtatatgccaccggtgagctgactcgtgccaacattggcgaaaagttgctggagatgtggcgtcacatgccgcgtaccttcaagcgcaagaagaacatcaagatgttcatttccgacgatttgggcgacatgtatgatgactggcgcaaagatgaaggtactatcgttatcggattaaaagaagatacttccgatacacaacacctgctcggttccaacaaccgttgtgagctggtacgtgttccaaatcttcccgatggtagccagtttatcatgctgagtactaaaaataacatttgctacggatttgacaaagagagcgatttcaagtctatcaagccgttcaattccggcaatccttatacgttcgatgctgcgggcaagtacgtgattggcttccagttcgtatcggtgcataaatcggagttctgcgtcaatgaccgtccggtggatcctgaagggaccaatccattcggatatatcgaggtcacaattgcaccggatgaagcgaaggccaacggtggcaaatggcgcattcagggtgaagaggcttggcgtgattccggtacgtatgtagcggttcccggtggtaaggaatataccgtcgagttcctggaggccgccggatataccactcctgccgtgcagaagaaaactcctgctgcgggtgcagtagagaaagtgacgggtacatacgttgttaaatcttaaaaaatcctgtgactatggcagaagtagatcccaaattatgtattgcccttgatgatatcaacgaggcaatggactgcgagaaccaggataatatgggcggtatcataccgtccgttatcttcggttatcatgcagatgtggcgacatggccggactacccgaaaaagacggatgatccgctttcactggaggccgccggtgcactggtcggtgatcttgttatgaaagaaggttgccgggcctataagatggatatcactgacgaactggctgagttcaagattacggatcagggagaaaccggtggtgaatcgttcctgatggacttgaatatcatttcggccaagatgcggaaaaagatattcggctttgagaatgcgaccaaaggccgcaagatgttcttcatcgtgaccgacaacaatggcacgaattacctgatgggtgacaagcggcgtggtgccatgcgtgcctccggagacggttctaccaccggggcaaactctaccgcgcgtaatcagaatacacttcattatactttcaccgcaccgcgtaaatgtgtgtatgaaggtgatgcggaagacattctcactgtaaagaacgcacctggaggttgatttttgtttcttcgtttggttagttgcttgtttatgtccgtctccggagtttttccggaaggcggacactttgttttgtcctatcacagcaataaaattcgcaacacctttgtataacgttaatatcaagaataatggctgaaattacaaatgcttatatcgtagcccgcagagaaggtatcgcctggctgaactctgctaagagagaatacaatactggtgtggctatccttgctaaatcaggttacaagacaatcgtatcatccaaactggctaaattaggcgaaaagccacatacccgcgagaagctggaatacgagatccggcaaatgattaaagtctggtatcatccggatgatccgcgctttgaggatgtggacctggcggatgatgcggtgcccggtaatgacggacgtgtcgagacggttccggaagcaacggcggcggccattgttaccattgcggaaaaagaactggcacgtgaaacggatgaacagcccgcttatccgcctgtcattgccaaaattatctatgatttccgggattgctacaatgaacgttcacggttgcaccggttactgtccgaacagggtgagaccaatacggcggctgtatgcgcacagcgcaaggatattgttacccgtatagcctccctctccaaccgcatgacattgctggctgccatcaaacagcaatatgagcagaataaggagttgccgactgatgagcagctggacgagctttataaaaaagtggatgccgctgaagaaaagccggaaaaggaagatgaacagaccgacatcagttccctttccgtcgaagaactgaagaaagcgaaatccaatgccaagagtaagattaccaaggcaaaaaacatgttgctgtattcttcagagagcaagcctaaagacggcaaggaaaacccgcttccggactgccccaaacgtgtgagatacgagaagaaggtggctgatcaggaggcattggtagagaaaatagagtatagactggccgagctgcaataatgttggtatgttgcagcgatatgaatgagatgccggcggagagaatgaaggacaatgcgctccctctccgccaaacggatgtggcagcctccgaccatgatcgggtttcggagaagctgctgcatccggacgctatgggaatgctggttcccggcagagataagcatttctattcttccggagcatttaacctgatccagttgattttatatattttgaaacagaccggtccggcacacctgttcttgactacttactccatctcgatggatagtatcaacgcccttcatcgcaaggttgagaccggtgagttgctatcggtacggttcttaatagacaaccgtgtacgcagcatctcgcccaaaccgttcgattatctggtgactacatttccggactgttaccgttgcctggcattgcatgcgaaggtggcgttgctgtataatgaagactggaacatcaccgtagtaggcagtcagaacgccacacataacccgaagctggagcgtggaatcatccataccggcagagatatttttgactttgactttaaaatgctgaatgatgaatttgactcaggaacaacgtgaggagatagagaaaatggcgtaccgccttatcccgccggggatgatcgcaatcaatatcggtgtggatgagacggattttcttgcagaactccgtactccgggcactgaggtgcgtacagctttctaccggggacatctcagacagatggttgaagtacgggaggctatcatcaagtccgccatcaacggcagcaatccggcacaacaggaactgatcaagttctttaaatcgcaaaagcaatatcttgagtatgagtaacagcttgacaacatccaaaagtaaatctgcactggaggaacagtcatatgaactcatccggcagcacattattgatccggaaaacagtccgttgccggagcatcttcgggtgcagtgcaaccgggtattgcagatagcccgtttgctggatgattatcccaatgagagccatatcatcaacatcatgctggcgaaataccggatttcacgtacacaggtacgtaaggatatcgccctggcaaaagaactgttcaagacacagcaccagtttgactgggatttctggtttgcctggatgatcaaggaccagattcagcttatccgggactgtaagctcagaggtgatctgaagaattggaacaacgctaagaaagtgttgcatcagatgattggtgagaaaccggcttcggttgaggatccgcgacgtatggagaaaaatgtcttctacatccagatcaacagtatggggcaaacagtagatatcccgctgaatgcgatccgtaatctttcacaggaagagcaaaaagtccttgtggattcaatgtacacgcctattgacgatgtgcaggcagaagaaataatgaactcataaatataacagccttgtgcgggctttgtaaaacccatatacgataaggaaaggagctaatatgccaataagtaaaatttacaactacgacaggatggagttcttatctaagttccctgacaagttctttgatcttgtaattgatgatcctccctatggaattggagaagatggttcaaagaataattcccgaaataaaatagctatagcaaagtcatatgttgcttattcaggaaatgacgctgatccacccccgcaagaatatttccaagagcttattagggtttcaaagaatcaaattgtttggggagcaaaccactttataagccgaatcccgattgatagccattgttggatagtttgggacaaggataatggagcaagtgattttgcagattgtgaacttgcttggacatcattccaaacggctgttagaaaattcaaatacagatggaatggaatgtggcaggaaaatatgaagcataaagaaaaacgtattcatcctaaccagaaacctgtggctttgtatggttggttgctcaacaattatgcaaaattgggttataagattggaagccctcacatgggtagtcaaagtgatagaattgcagcgtataagctcggctttgatttttggggctgtgatatagatgaacactacttcaaagctggagatgaaagatttcgctccgaatgctttggagaaactaaaacgagtaaaggaatattacttcagccaagtttatttggcgtataacaataaaatcatgaagaaactgacaaacaaacgcttgatctcttatctggttgaccacaaacatattgatatggtatcggtcagcaagacacaaattgtttgcaccgtatccgccaagtttaagccggatgaagtgaaaaaactattagacgatacagggcagccgatgccccgtatgacttcttccgaaggtgtgaattacattgttttcccacgttattgatacggcaggacaatggacgaaaacgtttgggaagaggtcatacaggtcaatccggcacaggcggcattcctggtaatgccgtacaagaacgggtatgtcatctattcacgtgcaacgggtaaatcattcattaccggtgccgtgatagatgataatatccggctcatgccgcgaggtattaccacactcacacaggctaccattgggcaggcgctcactaaaacgttgccctcggcattcaagatgctggagatgctcggttacaaacaatgggatccggtcagcaagaccggtgactatgtggtttgtcgcagacccattgagggctggtataagccttatgagcacatcatgtcgtttgagtatggcatcagcttctccaatggtcacatgctctacatacttacccagggcggtaacagccgcggaccgaatgctgactacaacatcactgacgaagcgctgacgctcgataaagagaagttcgatcaggaggcggcaccgaccaaccgaggcaatgaacacatcttcggacgcaagtccgagaatcccgttctgaaacatcacggcaacaccttcctttcctccatgccttacacgcctgaacagaaatggttgcttgaaccggccaagtattacgaagaagaacgcggcatccgactgtttgatgtctggaataagattgtgcggttacagatgcagctcattgatgcaaggattgcgaatgatgcgggactcttcaaggaaatctggaatgaaaccgttcgtctcaggcaaagcatcacgccgttcgtttcacgcgacggcacgctttttatccttggctccatcttcgacaatatcgccaatgtgggcatgaactatatcctgaaccagcacaaggtgatggataagctttctttcatgatcgagatactgaacttcatggtggataagattgatagctgttattaccaactggatgaacggcacgtgtattacaatgcgaccaatgacagctatatacgtgactttgccgaagatcataactacaattggcaacagcttgccaacaatgatgacagccggcgtgatctggactgcaatccgaaccagccgatagagctgacgcctgactgggggtctgccgcctcgttccttgaagtggcgcaggaacgcaattatgatttcgtgacgaagctgctgacacgtgagccggtggataacaatatcaacgagttctttgtcaagcgtgacgaggaagacgatacaatggtcaacgcgctgatggataagttctgccactattaccgtaaccatatcaacaaacacctgcattattaccgtgaccgctatggggatgcacgccgcgccaacaataaaaaatcctataatgaacttgccattgagcgcctggagaaacacggctggacagtggaacagcacacccatgcgggcatggagccgccgcagcatgataaatatctgttgtgggcttctatcctggcggagaaagacgaacgttttccgaagaagcgtttcaacggctcgaaatgcaaatacacgctgatctccatgaacaacacgcgcgttatcgaggatcgtgaaggacggtttgccaaggataagcgtagtgagcgcaaccagtccatccttcctgaagaggcaacacacttcggggatgcagtcgataaacgtgtctggacgaagtacgggcatctgctcaggcaggcttacgggttcgttgacgcacgtatctgattcactgcacatacattcgcaacagttatcgcaatacttataacaggactcgcaacgcttgaggaccggatgccgcatcggaggacaggcggagggtgttttctttggtgtaaaaatctgttacttttgtcatatttccttactttttgcgactttttttgcgacttttgatagggcgcggtaggaagaaacttccgtttctttttccattcggatggaaaacggggtgttgtgtgttcattctcaaggtagtaagattattataacattcattaacaaagtccccggcgcgcgcaaaatccgtactgaagaaataggcaggcatatctatttccccagtacggattttgcgcgcttatagaggtaggaagcgacgcttcctgtgtttgtttttgcacccatgcaggtccccggtcttttctgtttcaaattctaaggtagggaccgtagagcggtaagcgttccgcttgacgtacccccgtttctcttccggaactccttttcatttctgcatgtctgtatgcggtcaggtagtcttttgagtccgcaaatgtagggcaccggtctgacaagcaaggtcaggcgttgtccgctaaaaaatctccaccttgcaggtagtattcaagcctccggttttagtcggaaccttgcagaatgtcatcctcggcacctcaattattgcggcatcaaaaggcaaccataccgcacgtcatacagacacgccggaataaaaaaaagtcgttccgggaaacggagaatctgaaaaaggctccacccgacgactccaaaaatccagaataaaattaaaacttacaattatggcagcaaaaagaaacattcccgaagcatggaaaaatcagtggcataaaccaatgatttccttatttgactacataccggcaagatacgaggctacagaacgggaaaaacaaatccgctcactgatatgggacttcaaggcagggaaacgcagcaaacaggtagcggctatcgtagcgggtaagatagcggaaaaattcggttcgtttgccgataccattgtgtttgtctgtgttcctgcaagttcggcagaacggacggaaaaacgctatcgggacttttgcgaagaggtttccaacctttgcgggtgtatgaatggctacaaagccgtgaaagtgggcggtaaacgtatgaccatccacgaaaccaagaaaggcaaaagcatacagaacacggaaactattacgctgaatactgactttttcaacgggaagcgggtactggtttttgatgacatactaacgaaaggacacagctacgcacaatttgcgtgcgcactggagcaattaggtgcggaagtgttgggaggttattttttaggtagaacaattctttcttataactaatatatattttttgttatgaatactttattcgataatgattgccgctacatgagtgacagtgaactgatttacgagattagcaataacaggcagattgtttcagacgttgaacgcagcaacggggagatagacatcgacaggctgtttgcatctttgacgcctggacgcaagaaagtagctgtagcagcagtggagatatacaagagacagcagtctcaacaggttgaacgcaggcttatacgaatgagcaaggatgtatatgatttgatgcagccgttaattggtgatttacggaatgaggagttttgggtagtggctattaataatgcatcccgaataatcaagaaagtacaggtttcagtaggcggtatagaccagacttcggcagatgtacggctgataatgcaggtgttgataaatacgggagcttcgcagtttgcagcggtacacaatcatccgagcggcaacagccgaccgagcaatgatgacaagaggctgacggaacagcttaaaaaggcgacagcgttattcaatattcggatgatggaccacgtaattataacgaatgacggatattatagcttttgtgatgaagggatgatttgacggatggggtgcgggcgcacccattccgtttgctcgcacgctcgcaaacggaatgggacccaaagcggtattttgttttatatttcccgttccttcaaccacggaggggctttttttgtcctatgaaagcggatggtatgattttacctttgtgacaaaaaagatatgatacgcttcattaccaagtttgtcggtacctatggatatgattccctgaaggaattttttctttcggtggcacccagttttaaatataacctgcaactgccggctatttccttcagtgcaatcactgcggtagtcagtgaatggataggtattaccccgctgttggcgatggccatgctgatcgccattgtttccgagatgtggacgggtatcaaggcaagcaagatccaaggcataggatttgaatccttccgtttctcacgctgtatcatcaagctgtgtatatggctgaccatcatttatatcacccactcattctatctggagagcaaggcaggggcggaagatagcttcatcatgctgctggcgactctgttcttttcaattgtcaaagtgttcgtcatgacctggttctgtgtggagcatgtgacaagcatactggagaacctggcagttattgacggtaaacctaaagatacgctgatcaagcaggtgggcatgttgtgggtgacagttacagacaagtttaaaagaaaggtagatgagacggaacgttagttgcatgttactatgtgcgtttatggcacttctttccggttgggcaggtcactggctgggttcccgccaccggaatattgtctgcactccggaaacggtaatcaagcatgatacgatacgacctgtcattcctgaaccggaggtgattgtccgtgaggtacccgcagaagtagatacggcggctatactggccgattatttctcggagaaacattatctcgacacgattattgaacgcccatacctgcgggtggaaatggccgatgtcatatcccgcaatgcgttgcttgaccgtaccgtagtggtggattaccggcagccggtcgtttataacaatgccctggctctgggattggatgccgggcgttacagctgtgtgttatccgcggggtatcgacgtaggtcgtgggagttcagggcgggctatgacttgtacaataaatcactggtgttgggggtatctaaagatttgtggagatggtagcgaatttagtcaataacacgtatctgttttccgccgatatggaggatatccgtattacggacgtacacgaaaaactggctttcaagatgacggttgacgggcgggaagcgctttctgaagtgtactatccggacagtgggaacgcagtcgtcattagcgatccgggtgatatcatcaatgagtatttcgttcgtccggaactggatagcggtgatgaccggatagccctgccacccatgacggtacaactgtctctttcagacagcgaggcaaccgctgactacacgctgtatgtgttccactcaagataccgtgtgtctttcgagccgctgaccggcttcatattttattcccgctataaaatcaagcatatccggcagaatacgattgattacctttccttcttcgtgtctgacaagacaaaagtgtatctggatatcatctatctggagtccggcagcagcgtcaagaaaaccgttgaactgcaactctccgatgccaaccggatgatggcatataacatgagtccggttaaggtgggcaaactcgcgaacctcagggctgacaatatcctatcgtatgacgcacgtatcaccgacggcacgttgacggatcttgtaaggtatgttatggatcggaaaagccaccgtgaaatgcaccagttcctctattacaatgtattcgggttgccggaatccatatcattctcaggattggtgcagtatagtccggaactggagggtgatatcgcggacatggtgaagctgaaaaggagattcaatccgtttttcaatgatctgcgcacggtcaacaccgggtatttggacgaaaataagtacaaggccctgatagacatgctaacctctccggtacagcgatggtacgacacgccttcgctgccgatggagatcatcatcacagatattgactttacccatacgaaaatgggcaaccagcgggtaaacgtgaatctgaccttctgtccggcaagccggaagcatcaggtatttgacaggtactcgtttggtggcggtatcttcgattacacatttgacaggacatttgaataaataatatacacaatggaaacaatacgcagaaatttggcattggccgatatggatatccgcagggatgaacgcgggaaccggcgcgtcttttcgataaaattcgtcagcaaggagggtaaggtctactttatcccgcaggcatacgcctgtggtgccggacgcatgaacatgaaggaataccagcttcggggggtacagccctgcgactgcaagggcaatcccgaagggcatccctatcccgtggatatagacctgatactggagtataacaaaatgaaaatcgtattctgatgaacatactgtttaattcaagcggcattcccctgctgatgcagtccacgtacatattcggagagacaaccggggcaccgcagaacgagatgaaggaccgtgcccggatcctgtcgccatacgacttgtcgaatgtcagttacatagatatcgacggggtgaaagtacgcccgtggggagacgagaacgatttcccgcagaaggcggccgaagagatcggaaataccagtgtgcttaataccggcttgaaatttctccgtaacctgacacttgggcagggcatttatccttgtacggtgaacggttacgatgatggcggtaacgagatactgaagccggttacggatagccgggtacaagcttttgtcgcttcccggaacgtccggcgttacatggagaaggtgctgcgggattacctgaagttcggaaacggggccgtccagttcgtcccgtcggcagccggcaattcttttgcaggtgtcaatccggttaatgcgctttatcgccgttattccgaagtggatgagtacggagcatgtaaatgtattgtttccggatattggccgcagcatccgggcaaggggcagtacaccaagctggaggtactttccgagtacgatccgcagatgcacgccgaggtgttaaagtttgccgggaagatgaagaacggttttatcctgccggtgcgtgacagctggagcaatgacgatctttacggcatgcctgtctggtggccggcatacgtttgtggatgggtggagattgcccatcttatcccccatttcctcaagaaagcctataaaaaccagattacctggaagtggcatgtacagataccgtattcttattgggagaagaaatacccttccaaggactattccgtcacagaacgcgaagcggccattcagaagtatatggattcggtagaacagaatctctgcgggccggacaatgctgagaaaccgatcttctcacattatgccgtcaatgagatgaacggcaggattgaagaggaatggaagatcaagccgctggagaacaagtaccagggaagcgataatcttccggtatcggcagccgccaactcggagatcctgttcgcccttatggtcaatcccaatgtcctcggtgctggtatgccgggtggtacatacgccggtaatcagggaggttccaatatccgtgaggcgttccttgtgaatattgccaatgcctggattgaccggcagaatattctggatccgatcgaactctacataaaaatgaacggtatgccggagtgtgagttgcgtttccgcaataccattttagtaaccctcgataccggaagcggtaccaaaaaaacgttgagctaatgatattcagtgcagagaaatggaacaagggtgccgaactcaaggcactgatgaaggtgaataccgcgatttcgtttgacatgatggaggcgccacttcggggtgccttccgacaataccttgtaccgttattaggcgatgcgatggcgggcgaagtggttgaaatctataatttcggtccggatccggatgtgttggaaccgaatactgaaggggcaaccgaacgggaaaaactggatgtccggctacttgagatctgccagcgcgcgaacgcgaacttggcgttctggaatgatttcgatgaaatcagcgtccggatcacggatgcgggatttcaacggcagaaatccgacaatgaatcctttcaaggggtctataagtaccaggaagacaatcttcgcatgtctttccgcaataaggggttcaatgcgctggatgaattgcttgagttcctgtatgcgcatatagcggaatatccggaatttgcgacttcacaggcttatcaggaccggaaatccgccattgtccgcagtactgcagacgtgaatgatgtctgtttcattggcggcagccggattatcttcctgcggttgcagccgcatctgaaatttgtggaggaaatgctgcttcagccggctatcggtgacaggctctatgagcatctgattgacgggctggtcaatccgcctaaagatgaagagcggcagaagaatgtggaacgtttgcgcctggcttgttcccgatacatcgggacaatggcagtcagacggctgttgatggagacgggcagtattacggaccgggggttatactttactacaatccggtcaggtgaaaagggcaatgaacagaaagagccggtcgatatgaaacggatagccgtacagatacagaacctgaaggcggatgccgacatgtatatgaccgcattgctgcggattgcccgcagttattttgccgattactatgccggtgatccccgaaggatattcgaccgggacaatgaccgtaaacgtacattctgggtatgagagagcttcgtattgcatatcgcagcttcggagtccggcgtgaggttatacgccgggtgcctcagaaatgggaagagctgacaccgtcgcagttcctgctcgtgtcacggttttaccttcaggagacggatgaatcatccttcctgaaggagttctatcccctgccttccggtgtcattgcggacagctattacaggtataagctgagtgagctgatagagttcatcagcgactgtcgtgtccggatggatcgctttattctttccggtgtgtccggattgaaagcaccgggtgaacgcctgaaggggatgtgtttcgagcacttcatgcatgtggacaccgccttcaaccgctatgcgcgcgacggcaaggatgcctcactggatgctttcatatcaatgctgtacctgaaggataacgaatatattgtcctaccggcaggtggaaaaaacggcttatttagcaggcagaaaccgctgatactgcaaaaacggctgtcggaagtggcgaagatagacaggcatgtcaagtatgctatattcctgaactatgtttttgtcaaaaggtggctttccaaggcgttccctttcctgtttccgttgaacgaagatccggaaccggagaagaacaacaagaaaccgaccgcgccatcggtcaactggcttgatatctttgatgcttttgtcggtaatgatgtggcggtgatggagaaataccaggcgatgccagtggcaacggcgttccgcctgcttaataaaagaatacgtgacgctcaaaaacagaagaaatgacattttcagagtacatagagaatttggccgaacgccatgtcgatatccggcacaaggagaatgacgaggtacatttcctttcatccgaacgggagaagcacacggcactggacagcgtgctccactatccggcggtgattctggaccgtggctcagggttcggatatggcggtgctacgggggcatacctgaaggatcgtgattatctgctctttgtattggaacatgtgtccgatacttcagactacgaacagatagaggccgcacttgataagtgcgagcgcattcttgatgagatgctgaaccaggtacttgaagacaaaaggaagaaccgccaatggattgccttttcacttgaagaggtagaagcggattatgtggtgaatattgatagccagctttatggggtgatcgcggcaatacacttgtcgcaaccctataaggctgttaactgtaggaaggcattcaactgatatggcagatacggttgaaacacttaaagaattagcccggcaggtacgatatgctacgcaggagggagaaaacacgggagaacgtgttggacgtaccttggtgggcattttgaatctgttatcacagtgttctttggaagaactgaataaaatcttccttcataaatccaagcctgacgaaactcctttcctgctgaaattattaggaggtgccgaagttggcgaaacaatagactcattagttgccgggaaagggattctacttaaaaatggccgtgtacaggctgatactttggaagctcgttttgctctcattgttcaagaagtgatattcaaccggctttctgccatggaaagtgattattctttttctgaatcgggcacgattgagagcgtagaacttctggaggatggcacttaccgtttaccgctccgtaaacgtttggagaatgatttcacggctttggatgaaaatgatatcatttacggcatggtaaacaaccttgcctccggaggaggagattattatacttcctggttacgtgtcctgcatgtggatacttccgctaatgtgattactgctgttctgtatccggatagtgaagttccagggggaaagaattacccgccggagccattgatgataataacgcgtcgcggcaatccggtcaatgaagatcgtcaggcgtactggtatctttctactcgtgagaaatgtatctgcatgctcgatggcgtaacgaaacccatactggaagagcataattacgccattatcatcggcagactgaaacagttatcattattcgataacctgcctataaattaccggcatagctatgtctattgcaggggtatagcctttcaggaacgcctacagattcagtatccggggattcctgtcgtttcccttgtggaccgcggagactggagctccgaggttgctgcttctgataatccctattctgtatcttctacgtctgcggataccgtatggcattacgggtgtcgttggcaatgtctgattaacggcacgcttgatgagccccgattcggttcgacgggatgggccatgaaagaaggaaacccaaacttctctattgatatatcttctgccaacgattggaggatagacctggacaagatggatgaaaacggcaatcttgttgatgatctggacgtgctcactataaccggaatgctatataaccgggatgttactgaacatatacttgatgctgatgtggagtggacgcgtgatagcggtaatattacggaagataacgcctgggcagtgaaacatgccgacacgggaaaagtgctggtgctcaggcgtgatgatctcggaacgaactttgtgcaggtcggttcctgtaaatttaagactaccgtgctgctgcgtgacggtaagaatgtataccctgatgaaatagaagttgtgatatgaagacaaagaaaatagaagtaaactacaaacctcttagcgtacatatggcgattaacgaggttggttccgtatcatcattgcaaacgtatgatgcggtgacgggaatctttgaggcggactatacgttgacgccattggtgttgttgcctcaatgtgatgttgttgacaaggatggtattattaaggaatttaatataaattcctctctaaccaatcttaagtggtatgaaatcattgatggcaaaagaatcctgattgaaacgacgaataccggttatgaaatcactcaggaaggctcaaataaaggtcagataaaagtaaagaagaatgccgcactcttgcaccctataacgttggatttttatgcagaatacctggatacgcgcacaaatcagatcatcgtttaccgtcagtcaaaattaataaaatgtatcaatgctaccaatgccaatcctttattgacgcttgatagtgaatctacccatttatacaacccctgggaggaccctgtacagcagaccatagtagctaccctgatggcaggtgaaaccgattttaccggtgtatcagcaaaaagaaaattcttctggtacaaacgtcgtgaaaatggcaccctgacgcttgccggttctgatgaatttgatcttgatgtggtcagtgtgaatgataatgtgcttgtcattgatcgcgaggcgataggagaaaaggagacctacatttgcaaggctaccttttcccctgatggttccccggctgcctcaccgacggatgcggaccctacggctaccactactattgtgcgtcgtctcccgaattatgattacgacataaccaatctgccgaaccgtattgctcctggaacagtgaccgtaaatcccaaagtcgtggtaacaggagcgaaaggcattatcggcaatgccatgcaggagttgaaagcgacctggtataaggacagtacggttatcgggaccggtgaatccccctctctttccgccaataatgtgaccagcggattattgggtgtggatatgacagacaagggtaattacaagatactgacaaccagtgacggaaaggcaatattagcaagtgctgataaagtaataatagcaaaataacaattaaattttaagaatatggctaattacatcaaagtaacagaaaaggtggctgcgtcaatgggattgacaagcatccgcaacaagactgcagacgggaattatctattatggcaggctgacatcctgcgctttccgggagacgacatattttcccgtgcggcttattgcggtggagccgtgctgactcccaatgccgcaaaagaagaagtggatggtactgatcatcctgtgcaggttgctacacctgaaaggttcctgttttcctcggagcaatctccgtctgaagaggaaaaatcggaaataaataaggaggatgaggtatgagtatagcaacccgacaagtgaatgtaagattttcgccgaaggcgggaacttacactactattatccagtctccaagcggggacctttatcaggaatttgaaggatccgtgggggcaatcggtgctatatcgcccgatttttcccagacgcagccgcagttggtgtttattgcgacctcgtcccgcgtggcggaaggtatttccatacctatctcttgtgactggtatttcaacagtgtgaagctcactttcaccaataatgtctccactaatgtgtttaatggagagacagggcatttccgcaagttgccgtatgttgcagggacgcaggattattggggcttgaaaatcttgaaaaacctggttgtggctgcgggcgcggctccttgcagcattaagggagaagccatagtcgtatatggtaatgtcaccgataaggtagaggctatctacaatatccctattcgtcgggctaccggttctccttattttgttactattgccgctggagataacaagtattataccatcacagaaaaaggcggtagctgcatactcaaggctatgacttatcaggcgggtgtttctgttacctctaatctgacttacaagtggtataagttggttggcggtgcctggtccttactctcaggaaaaacggcgcagacattgacggttacaggtgatatggtagattgctattccagcttcaaatgtgttgtctcgcaagggggaactgaaatcggtacggatatacaaggcgtaatggatgcttcagacccttatgatatcattcctaatccaagtccggctgatgagacgattgtcgaagagggcgatactgtggtgtatactcctatggttgtgaaaagaggctctacgactaaggcaatggagatgaactttaattttaccgccattgatagtgtaggacttatccttgggcaagctactaaccaggcaaactttactgtgacctatgcgatgtgtgaacaggctggtacggatgtaggcgtgtatattgaaactgtgtcataaattttaaaatgtaattgtatgccgatagcgagtgtaacaagaagtgtaaagtatgcacagaagggtgctcccggaaagagtgggcgtattccgtatccggccggagagtacaatctatatacttcctatatttgtacagatacggttactccttatgtgttggatgggaagtattatgtaatgaatcgaaatacgacatgggtaggacagggtatgccctcaaatatcaattctcctcagaaggatgttgcggtaaatggatcgaaagccacttggacgcttgttgaagactatacagctattttcgtggagattctgatggctaacttcgctaaattagcgagtgccatcttttcaggagattacatgttttcgcagcagggggttgacgctgatggtaatccgacatcgaattatgaggaatttaatacggggaattttgtacctaatctgcttctggattttgccacgggcttattcaaagggaataaagtagagttgacgggacagatttctaccgcttctgaaggtaagcgaattgttattgatccaactactaatagtattgcgatgtatgatttccttggaaatcttgttggaaagattagcttttctactgtagaagactatacttctcctgtaattgaactatatgatatggctccaacaggtgttataggtggtaagacgacaattatgccgggtagtgtatcgttggaatctttatatttcggtgataaatattcggttcatatatctccttacatcggcattcaatttcgaaaaaatgatgttacaactaaaacatatggtaatagttaattgatatacgagaatttataattacaaaacgagatcaaaaaataaatgttgaatttgggcgtttttcgctatagtttaaacgcccgttaaaaatacaaggatatggagaagactacaattaaggactacaacaatggcttggaaaccaaggatagcctaagtaaagtgaaagctgttgatggttccggtaatgatatacttgttaatcctggaattgtcgtacaatctggagggtgtggaagatacactccggatgaaagggtatcgcaaagcaaatggtacagaattgctttggggcgttatgggaatgttcctcatgctgtgctcttgatggtaggcaactattataatagtgaggttccaagttctcagttactatatatccatgctgatggatatagtgataggcaatctattgttcagttggcaaattccggcagagtaataagtaaagctcgaattttatatcaagcatcaacggctaacgggccaatgcttgatatatttattcgaactgcaaaaacaaatcaattaacgctttcttactcatgtaacatgaattttactttccaatcaccgattgaagttcctgaagaacctgatgcgggatattcagtcaaagaattttcattttaaaagagggcgactacggtcgcctatttttgtaccatgtcttttgccccttaaaaatacaatggtatggaaaaagtttatttgaaggattcagatgtagtgaacgaattgataaccacaattccggttgctacaactgagaaaaatggtcttaaacccgccagtgatgtaagaaaggaaaagatgatcgcaaccacaacctcaagaattgtgtatgaaggatcatcctcaacaacagcaatatctacctccttacttatcagtcttgccgcttacggtggcgggccaatgaccttattctatatgaccattaacaggtcagtcgatgttttgaaagcccccactatcattttaaatcggataggtggggcaaatgctccgacaactctacgatttaaaatatggtcaaacgaaagtaccggagcgtttaaaatcatattagagcatacgcaacatacgccatccatatatataaagattctgaatactattatacctacttatgatattgtacctttatcagtagctaatcaagatgaagttgacgcagcgacatatattgatgtgacacaataatagtaggggcactatgcccctattatctaaaatgaaacctgtgttataattccgtccagtcggttacctcctcttcaataacgttacgaaacacgcaatctgaggtataaaatccttgaaaacaggttgcaatagagtattcagtattaaattttattgcaagatataattgtccattatacctgcaatgtcctaatttaaagtttacaaggttattgcctccccatccacctgtcacattcatgtcttttacaagatacgacgcagaacgaaacaacatgatatcggccttggccatcatcggactgtagtctacacctgctcttaacacaaacaaacttcccaggactccggcagcatctattttatctgttaaaccggaaataggaacaaatagcagaattcgacttcctgccccaatactattactgtatctcagttgtgtatatctcattttgcccgttcctgaaaccaaagcagtatattcaaccttagacaagctatctacagttacctgcgctacattctgatcggcagttaatccaataattgatgagggagcattggtgaatgcaacttctgacaattttatcttctccataccattgtatttttaaggggcgtatgaagcacaatttgcctctgctgaattactttgttatcttcacgggcaaaaatgatttacgcatacattagggtgagtaccgataaacaaactgtcgaaaaccagcgatttgaagtgcagaattttgccaatgaacgcaaattagtgattgataagtgggtttcggaaacggtgtcaggcacaaaggccgctaaagacagaaagttgggcccacttttaaagagaatgaagaagggtgatacgctcatactttctgaaattagccggttaggtcgtaatcttatgggaattatgtcgatgctcaacctctgcatgacgaaagaaacctttgtgttgacagtaaaggaaagatatgagcttggcaataacattaatagccaggtactggctttcgctttcgggctgtcagctcagattgagcgtgatttaatttctcaacgtaccaaggaggggcttgccaggcgtaaagcaagcggtcagcaattgggtcggaagaagggcgataagaatacacattataaactcaccggaaaagaaaatataatccggactatgcttaattatggttactcaaaggctgctatctgtagaaaactgaaatgtaactttaaaacacttgatgaccatttattaagaatgaatgtcctatgtaccggctaagctacatgctacttttgcctatatttcattcatttatacattatggcaaaagcagaagttttattcaagatcatccgcaaatgggaaggcggatggagtgatcacaaaaatgacaaaggtggtaaaaccaacatgggtattaccttgtcaacatggagatcatgcggttatgacaaagacggtgatggcgatatcgatgcggatgatctacgattgattactccggaagatgtattcaatatcttcaaaaagtattattgggaccgttatcaggctgattttatacataaccagcccattgccaacatttgtgtggactgggtatgggcttccggacgttcgggaatcacaagggtacagcaactcctacagattaaggtggacggtattgtagggcctcagacggttgccagtattaatctggccaaccagtgccagttgtttgaagctgtcaaggcggaccggatccggtttgttgaagaaatctgtaaaaagaatccgtcgcagcttgtgttccggaaaggatggttgaaccgaatcaatgatttcaagttctctgttcgctaatttcttgtcctttttcccactctcttcagcctttagttttgtgcctgaaactaaaggcttttttatggcagaagatactaatcagagcagactggtcacagcaccggaatttaaaaagaatgtaagtacctggatggactccatcattggcatgtcaggaagcatcctttatctcaggactaaaggtaccaatgagttaaaccggagtctggagaagaaaatgcggtatgccgaagggggtaccgaagatgatataaaccgcatcgcattcaagttcaagcaatatggcgtattcgttcattacggtgtgggacgtggatatacccgcatcaatggcatggtagtcagaggatataatctgtataaccggaaaaagcgtacgtatcgcaacgaggccatcaggacggcactggtcaagaaaggctactccaatgcggaaataaaaaagcagaaataccggaccgagatcggtactttcaccgtacttcgcagacccgttgatttcattgatggagtaattgacaaacatatcaccgagcttgcggatatctccggagaatattacggagacaaggctttcaaaaagatactggacacatttggcaaactaaagattcagaaaaatggcaaaaagtaagtcagaaaaaagaggcatctatctttatatagatggaaaggaaatagtcaatgatgtcaaccacatagagaaagagtgtcggcaattgacgcagcagctgaagaccatgactatgggctctgaggaatacaaccgcactatggcgaagatacagcaccttcagggcatactcaaacaacatcgccaggagatcaaaggtatcactaccgagaccaagaaagcaactgtcagtatcggcagtatggtagattggtttaaccgctttgggggtgtaatcctttcggtgatcgggtttctgaccggttttactcttgccttgcgtgccatcagagatgagcgcaacaagttagaagagtcacaagccgggctgaaagctttgaccggacttgatgatgataacattgcctggctaaccgaacaggcaaagacgctttccaccaccatgacaaaagaggggttacgcgtccgccagtcggcagctgagattcttgatgcgttcatgttggtggggtcggccaaaccggaactgcttggagataaggaggcattgaagcaagtgacagaagaagcgatgcggttacaggcggcagctaaggatatcaccctcaatgaggcggttgattcgcttactttgtcgcttaatcaatatggcgaagctgctgaccaggcaggacgttttgccaatgtgttggctgccggttctcaagccggatccgccaatatcgcaagccaggcaaaggcaatccggaatgcaggtacagcagcagcttcagctaatgttcccattgaacagacagttgctttgattgaaacgcttgcctatcggggtataaaagatgaagtggccggaacgggattgaaaaagttcttcctggtacttcagaccggagcggatgaaaccaatcctaaaatcgttggcttggataaggcactggagaacctgaagaataagaacatggatgcaggcgccattaaaaagatgttcggggaagaaggttataacacggcatccgtaatccttcagaacacggagatggtgaaggacttcacagctgccgttaccggtacgaatgtggcgtatgaacaggcagcaataaacagtgatacggcacaggcaaaattggaacaggcgcgcaataaaatgaaattggcggctattgatttgggtgagaagttgaatccggctttggcggtgagtacaaatatgctgactaatgttattaaaattttgcctggactgattgattggtttcaaaagtggggcacaacgataatagccttcattatcccattggcaacctattatgccactctaaaactaatctctctttatcataccacttacaatgcaatccttcggggaggaatcgccatacaagctgcataccggatagctaccactgctttgaatgatgcactggcgggtgactacaaggcaataactcgattaattttgcagatgcgttctcacaatatcataactcggacagtggcagcaagcacgcttgtttttcgggcagcaatggagactttaacctttcgtttttctgccgcagctaaagcaatacgggcagcatgggcagtattgggattaaatccttttgttgccatagccacagtcgttgcaaccgcagcgaccggactgtatatttatgcccaacgcacttctgttgctgcacgtaggcaaaaagagttagtggatatgaatagggaggccgaaaaaagcatcagcgaagaaaagaataaactggatgccttgcggaaggtacttgaggattctaaagaaccatatgcaaaacgaaaggctgcattagaagaaattcagtccattgttccggaatatcatgcctcgttaactaaagagggaacgcttatcaacaacaatgctcaggcgctggatggttatgtagagaagcttcttctaacagctaaacaacagatggcaaacactaaattacaggaagcgctgagccaacgtagcgaatgggtacacgagaacggttcggatgccatgaagtttaagaatcttgaatgggagataaatgatcctgttaatatgggaaagtctgttgaggaactggctgcatctaacggggtatcacccactgcgtataaagcatgggcggcacagaaaaaacgtcttgatggcaatgtgcgttactacgagcagatgatgcaggactatacagcccaattactcgctatcaacaacaagtacaagactgttactccagatcctttgtcccctgttactaatggcggtaatggaggtaccgaatcagaagaagaacggaagaaacgcgtgagtaaggaactggaggatctggagacgaaacacatgcagcagatgacccatctgcaaaaactgtatttagagggtgagattaaaaccaatgaagaatatactgccttgcaaatagacctggagaaaaagacgttggatgaaaaactaaaaatagttggactggaaccccatgaacgagaaaagttacaggtaaagatgttggaggctcagattaaatttaatgaagaatgtaaaaagctggatgaaaaagctgaaaaggaacggcaaaaagccgcagataaaacagctaaagaacgtctttccatacgtcagaaacaattacgtatcgaactggaagaagctacagcaaaccattataaaaatctcacttcagaagaagaatttgcaaaagaggttaatgacatcagacaacgttactggcaggatttacttgataactatcaactgacagaggaacagcggacagaaatagataaagagcaggccgaagcaaaaacagatgccgaaaaagaaaagtatgagaaaacgatggagatgcacaaacaatatgtatccatagtagaaagtattgctgctgattttggtgaaaccatcggtcagatgatcgctaccggtgagttgtcattaaaagacttcttgaaagaaacaattctgatggcattggatgccctggagcgtgtcattgaaatttcctgtttggaagtaatggttaagaatctggcagcaacagcccctttatcatttattggtgcagcaaaagctgccttgcaaatagcggctatcaaggcatcctttgcagtggttaaaggcgtggttggcaatttttacaccggaggttacacgggacatggagcctgggatcaaccgcagggtattgttcattctgatgaatttgtagccaaccgttttgcggtggccaatccgaatttgcggccgatattcgatgttattgatgtggcacaacgtaccggaaatgttggtaacttaacagctgaagatatcgcagccgtggcaggatccggaaagaatacgcataccgttccagctaaggcacccggagccagtgccacaaccaccaccaatgatccggctatggtggcgatgctcgttgaatgtacccgtgcgctacgtaaacttaaaaatcgtctggatgatccgttagtagcggagacttatgttaccggtaaacggggtatcaatcaggctcaacgagattataaaaaattagagaataacaaatcacgtaacaagcaatgaccgaattatacattgacggacagttggccgcccttcctgaaggattcaactttacattcacttccgaaaatccatatttcacccgtagttccaattattcgttggatatagaacttcctatgccggctaatcatgccatattcggacatattaaccggatggatgtaacaaagaaaaagaccatacttcccgccatgctcattgtggatgccaggtgcctgctttatggcagcgcagttttattgtcggtagaggacacattggttaaagtgcagctggtatctggtaatgcggagtttaatcttcttacgaatgatgatatctatattgatgagttagagctgggaggtccttatatgcctccgcagccgggaatctttcaattcttcttaccggaatcagaaatgaaggcagcctacggctcggtagatgaagtggatggggtttttctcccggtattttatcaagaaacaaaagaggagaatttggtcaatagagttacatatgaagagggaacaaccaactttaatcccggctctaacatgtttgtaggaagtttccaaccctacctgcttacggtcatcaaaaaactggttgaatatttcggatatacctttgatactactttctttgataacagcttcttgcggaatatctatatatgcagtgcggtaaactcattccgcattgaaacagcattgccacactggacagtttccgagttctttgatgaattggagaaattcctgggtgtcattaccgttgtagacgaacatgccaaagtagtacgctttgttgaactgaataattatttctccaatcccgataaagagatcattgatcacgctgcattgttgcgtgaatatgcggtcgaagtggacgaggagaagaacgataaggatgtaacctctggcaatgtcggttatgatcttccctccacttcagatgacggctacttccgactggatcggtatctgctgaaggctgctaaaaaggctgaatatgccaactatcaggatatgaaaaatgcttacgacagtatgaataatgaagaacggaaaagggtgatatttgtcgtaggtaaacgttactacatcaactacaatgagaatgagacagacacactgcgtgaagtcaatctatatgctgaccttatccgtgatccggaatcttatgatacggatgccgagctgaagatagtccctgccaagattgtacaatatgatcgtggtacatggaaacggctggaacataatttcgatgtggtgagaactgacaccagcttagttttgaatattcccttaatcagctattaccgcaaaaattataatccggattggataatcagtcctcagggtgaagctttcaatatccaagaagccatcagcggtgatgttgagttaccggaaaaacagcaaaagaatgatcgtatggagatagctttcaataccggaaagttcaatcggcagaacgtgacctctaacggacaaaccaaaccttacagtcatgcttatccgtttaccgactaccagcagaaaactgctgcgcagctcactgattttcttccgtattcgctcagtctgaatgacgtttgtccggacagcataggtcatcggctttctgttctgaagatgtttcattccaatattccctatactatcaatttccaggctaaccgtttgccggatgttaacaaggtatttcttattggtaataagcaatatttgtgcgagaagattgaggcggaaatagatgcggatgggttaaatagggtgctgaaggggactttttacagggtagaataaaaatccccgtagcggttcatactacggggataagtgtcaataaaacgtctctcaagatatggagagtgaacctaattgtttgctgatgtcctgaagagcaaaattaaatgtttccaggtcttttttgctaagtgtataaactttgcctcttactttacttccgttgatacgctggctgagccatgctgtacttttaccgaaatattttttagcaatgtagcctaacggaataatttctgtataaggggctatttgctgttttaatgtaacataattgatctgttcttccgcctctgatgcaatttccttgtagccattgattaaaaaatcggctattgcatcgacatctttctgatccgtgtacttgctggttatctcgtcagagagcgcaacatatttctccatggcatccggtgcaccggagtgagcgatttcatgcaatttctttaaatcatctttaagtgccataatcgtattgttttatgctccccatgtggggagcttgtttaacttcatttttccaattcatttagaactttttccaaaagtgctatctgtttgtctgtttcaagtttggcatccaggagttcattcattttctgtgtactcatttggttccctgcattcttgaaagtgtgttcatacattttagataacaattttaactgggtaagttttgcaaccagttgcattttggtttctttttccatatctcttcgttttaatgacaatgcaaatatacataaagttttatttatgtgcaaattccataaagaaaagtttatgtatttcgttttttttatgtatttatcgtaaattggggtggagaggaacaggctttctttgggatattaatttcaattttatatttttgtggcatctaatgatgccaattgttttacatgacttacatagtgcctttagtattttcatcagtcaaacatcgcgattttaaaggcatgagtagcgcatcttcttgtaaggtgtgctactctttttataataagaaccctaacaaaagaccaactaataaagctatgggaatggctacgagctgttttttaacccgggttatgtcttttcttaaagacataacttctttgattataacagaaatatcatcatctataaaatacataacagcattgttttttgcaaaattattataaataattgaagttgaagcggagaaataaaaaatctccgcttttttttctcctatccatacacaaccatcacctatatccgatatagacatcgtattttagatggcctgaaacaaacgggtggaacctataactggtttcgtccgtttgtgtttattgtatttgttgtgttaaattatggttaaatattttataattatttggttatcaaataattataaaatatatttgtctttgaaaatgaaaacaaatcatataaacaacaagattatggaaacaaaaatcattacaagagtgaataacgtggacattattgccacaagtgacgaacaattggtaccaatccggcctatttgcgaggcgttggggattgatgtggaaagacagcgtagaaagattcaagaggacgaagatttgaattcaactgccgccctgacgcccgcggttggagccgatgggaaagagcgcgaaatgctctgccttcccatccgttatatcttcggttggatgttcaccatcaaccccaagaacgtgaaacccgaagcgcaggaagccgtacgtatttaccgacgcaaatgttatgatgccctatacagtcacttcttcggaacacaaaagagacagatagagcagaatcgggtagaaatatccctgttagaggaactggccgatctgaaccagcaacagcagcagttgaagcagaccatcaacgaaaaacgcaagaagttggagaaacttcgcgaagagaggctgaaaaacgaaccacagctgtttgattgaaaaagtactgaaggagcggagaaataaaaaatctccgctttttttgtcgtttggtaacttatttcgacctttgcagtgcccaattaaaccaaacgtttcaattccttatgtcgtgtaacccgtactcaatcgggttccgggtggttctggtgggcgcacggcataaggaattgattttttgcaggcaattaattaacattttaatattatggaaaagaagatttcatgtttattgttttctattttagctctatcagcttgtagtgtaagtaatttaccggcacctaaatcagaggtttttatgattgactattctatgttgacgcaacaagggtattttgtaacagaatctaattctgtaagtttcgactacgaagcgataggtagtatttatgctgaagaagttggtgggtgggtaccaaaagatggaaagcccaaatctacggatcctaaagagaactactatataaattccggtcggaaacatatttatcagaaacctaatctccaaaatacctatgtcaatatagcggataagctaaaagctgtgggagccaatgggattattaatctaaaagtcagcaattattctaataaaattataattacaggtatggctatcaaaaaaaaggattgacataaatttcaattttataaagaaattaatcgaatagtagaacagcttaatttctttatgagcaatactaactttatgaaaagatatggaagcggagctggtagactccgcttttttcgtacatagctacgaaatagttcttcaaataaaaaatctccgcttttcttttgctgtttcaaaataaactctcatctttgcatcgacttccattttgaacaggcgacgagtagttcgccaaccgattgccgttggcattttttatgcccattggttatctatatagttccgacccccgtgtggagtgttaatgcacccactgcctgttcaaggtggaagtcaacgggaaagcggaactttttttgttcccttcccgtctatttatcaatatgatgtttcattttaaatgacttccaaaatgaaaaaacaacctcaacgcgcccgcgaacgctatgtatccgcggagaagctccagcaagcatttgctcagttgggcattgaattgtgcgccggacgtgaacggatccgtgcaacacaaagtgagaaatccatttccatctatgtcaatggtggaacagtcaacatcacctttaatgagaaaggaggcaaagcatgatgttctttgtttaccatttacagacatacgctccgaagaatcgggcatggaaaaaggtgatcgattatgtgaataagtacgagtatgttcttatcaaggatgaactttccctggatgcgctcaagcatgaattatgtgacgtaattaacaaaatcaatgcggatcatcccaaactgaaacgcatacaatattctgccgatcctctggatggcagccgtaccatacgtatagaggctcgtgttataagtggcggatgtccggatcttgtgttctttctcgatatttgcaaggttcgttccgtttatcaatttagcgagaaggctaatgtactggagcagaaaggaggcgagaatgaatgatgagttctttatcaccaaaactgtagatacaggtagcgaaggcactaagaatgttagatatcacgtttatgctcgtaattgtgatggtgagattaatgagataagttatgaagaactgatgcggtttaaccagttccttaccaatttcttaaaagaggaggagagcagccatgaataatcgtagaaaaataggctttcgggcatacaatgatgatgctcaggatcccgaagaagatgaactgaagagagaacaggcagaacggcagaaagctatagccgaatttatcggccataactattcgcctattggtgatacctcgcagaagtgttacaagacttctgcggaattagtgtacgatatatccaatatcattgctgtccgtccggcggaattggccaaacaactcagtgatgctggctatcgtgtggaatatttggcaggacagccatattgggtactgtacgagaagacataaaatataaacgaaacattttttttacattttttttggaggctcttgtccgtgaggataggggctttctttataatccgcctttaaaatgttttgtttcctcgtgtacggctaaagaatctccttttaaatacctgtttgttgtagcaacatcgctgtgtcttgcttgatcgcgcgcaacgactatgccttcagagttagccaaatcgcgaatgccggtatcttttaagctataaaattgatagctgtttggccactttaagaatgcgcgtactttattaaaatattctctgaatatgcgggaatccgctttggtggcattaggcttgaactgttttccaaatagataaaaatgagatggattttcaaaaacctcaagttctatcatgatttttatgacagcatcattgaggccaaccatgccatcacgtcggttcttactgatggttgaagatataaataccttttgttccttaatgtttatgtcgctcaggcgcacattgcttaattcgtccggccggataaaagtataatactccatcatacaggcaagtaagaaatgccgattcgtttcaccgagatattcttttaatcttgttaaatcaggtgcggttaaggcggaacggcgtttctctccttctactaatgcctttattcgttccgttggattgtgatctatgtatttcttttcttgtagccaggtgcagaatgcggacagccatgtacgataattgtttctggttctggctgttgaatcccggtctaataatatatagtctaaaaaatcactgatataacattggtcgaactggtatatgtaggtgatagggttgcttctggtagagttgtattcgagcaacatgttcattctcgattgatagtcgtaggctgttttctttttcagcgtgttgttacttgtgagtttctcgatataccttatgtataaagaggtaacttctgagaatttggcatattgacgttctgttgatgcttcaatccatggattccatccgcttcgtaggcgtgatgtggcattagcgatgatttcagcacctctttttttgcgctctgaaatcttggagatagagtccagcatgtatttttttcgccgcatctttccatctgcgggatcaaaacaagtaaagtcgacataccaatttttaccggtgtgtagtttggggagggtgtaatccactatattatttattgtggagccttttcgagttttggatagagacatttttttatacgtttttcgaatgcgaaaacgtatgattaaacttcagctatttcgtttgtccgacatttgtccgacctctttaattgaaatgaggataaaaagctgaaatatagctaattatcctcattgtagttgcggagatccgactcgaacgaatgacctttgggttatgagcccaacgagctaccaactgctccactccgcgatgtttaacgggtgcaaaggtacggctttttattgaacaaacaaataaaagccatattatttttgctaaaaaatgtaataaacggactaacttattgataagtagtgttataacagatatactttttttatcctctccctgtgaccaaatgttaataaaatgtgcgttttcttgtgtggtatgcagaaatgttttacttttgctcaaattattaagcaatgtgcaattattaatatggccgtatcgaagacaaaagctaaattagtggatgtagcccgtcagctatttgcgaagatgggggttgagaataccacaatgaacgatatcgctcttgcttctaaaaaaggtagaagaacgctttatacctattttaaaagtaaggaagatatctatatggctgttgtcgaatcggagctggacatcctttcggatataatgaagcgggtagtagagaaagacatctcgcccgatcagaagatcatcgaaatgatttatacccgcctggatgccgtgaaagaggtagtgtaccggaacggaacactccgtgctacctttttccgtgatatatggcgggtagagaaggtgcgcaaacgttttgatgccaaagaaatacagcttttcaaggatgtgcttcgtgaaggcgtggagaaaggggtgtttcaggttgacgatatcgacatgactgccgaattggtgcattatagtgtgaaaggtattgaagtgccttacatacgtgggcatataggtgctaaactgacggatgaaacacgtggacaatacgttgagaacatcgtgttcggggcactgcgtagaaaagaataactttaatcaataattaaaaaagtatgggattattagatggaaaaacagccattgtaactggtgctgcacgcggtatcggtaaggctatcgcattaaagttcgcttctgaaggagcaaatatcgcattcactgacctggtgattgatgaaaatgcagagaatacggcaaaagaaattgaagcaatgggcgtgaaagctaaaggttatgcttcaaatgctgctaattttgaagatactgccaaggtggtagaagctattcatgcagactttggccgcatcgatattttggtaaacaatgcaggtatcacccgtgacggtctgatgatgcgtatgagcgagcaacaatgggatatggttatcaacgttaacttgaaatccgctttcaatttcgttcatgcttgtactccgatcatgatgcgccagaaagctggtagcattattaatatggcttctgtagtaggtgttcacggtaatgccggacaagccaactacgcagcttccaaagctggtatgatcgctctggctaaatctatcgcacaggaattaggttctcgcggtatccgtgccaacgctatcgctccgggttttatcctgaccgatatgactgctgcattgtctgacgaggtaagagctgaatgggcaaagaagattcctttgcgtcgcggcggtactcccgaagacgtggcaaacattgctaccttcctagcttctgatatgtcttcttatgtatcaggacaggtgattcaggtagatggtggtatgaatatgtaagaaagcgtatgactgtcgtatacgaggacaatcatatcattatagtcaacaagaccgcttccgagatcgttcagggagacaagacgggggatacgccgctttcggaaaccgtaaagcagtatctgaaggagaaataccagaaacccggtaatgtcttcatcggtgttacccaccggctggaccgccccgtaagcggtcttgttgtatttgccaagaccagtaaggcgttgtcccgcctcaatgaaatgttcaaaaccagtgaggtgaggaagacttactgggctatcgtaaagaatgccccgaaggagccggaaggagaattggtgaactatctggtgcgcaatgagaagcagaataagagttatgcttatgataaggaagtgccgaagagtaaaaaggctatcctgcactatcggttgataggtaagtcggataattactttctgctggaagtggacctgaagaccgggcgacatcatcagatacgatgccagttggcaaagatgggatgtcctatcaagggagatttgaagtatggctttgcccgttccaatccggatggaagtatttgcctgcatgcacggcatatcagttttgtgcatccggtatctaaagaaatgattgaagtggaggcacctgtaccaccgacgaatctctggcaaggctttcagatgatataagaaagagcttaccataaaatagaaatgcgtcaaaagactatttagccttttgatgcatttctattcataactttattctcttatcagaaaaaacgtggttttacgaatttatctttataagatgtgaaacgaagtcctgacattccattgcttgacgtagggaagctgacagacttgatgagtgaataatcatccgcatccagtgcataatactcttctgctgtatccgtagtgacgcatacggtccagtcaaacatattaccgaaaatggaaaaattatctgtttccggattataagaaggaaggccggtctttattacttcataggttttattcttcagtacgtagaagttgttgttcacgtccgttatatatcctaacgtcttgcggtcctgaaactctgtaataaatagatatttggcgtttaatccttcaggcaggggaatagcacgtacataaggacgtccttgggtttgcttcatatgaaacagttttccttcggcatccagtatcaggtacccttcatcatactctttgcgggtgctaggattacctgctacatactgtgccggaaagcgaaactcttttttctttaaaacttccgtgaagactttgcttttctcctgatctatagtgttattttccattacgataaattcaattccatggggggtgatgcggaatacgtcatccggcatcttcaggtctactcttcctgacatactttccagtaaagggtaaaggggaacggaaggggcgttgatatccgcagcggaaacacggaagttaaagttcgtgatttgtacttgacgcggacttacgggaacccccattagactgtctggaaagcgttcatcggccattaactggcgcacgtagaataagggcagaatgctgtctgtctgctcttgagtgtaattattgcccgactgatcccggcgtatcagtccgacgctttcttcataccccatagacaagaaatcacctataacgcaactgtacatggaaaaaggcgtgcgtgaaggtttagctgcaaaaaaggtgtaacaccagggtaactgccacaggagcagcaacactagtgtaatacagaggaatattatactaaaacgtttcatttttctttctttattaatatatgtacatcattttaatcctgcttaccggctttgaagcgtagaacagaaagccaagaaaagctgattgtcagcagactataaatcgtcaaccatggaaggaaaccgttgtaagcttccggatcggatgaaaggaagaatacccggagtagcagaacgcttatcacgaggttgagtactctgcgtttccaggtaggttccagacatacccaggcaatgagcagataggcgcatattccggctatataccacggaagagctgtcagtagtatgcgtgaatatagttcaggagcgagtataccctgtagatacacaaacattaggatataattggtagcaaagcatattactaatgtcagcaaaccgtaaagaagcatgaggttaatcatttttagttgcggataaggtaaatgcagggtcagtttcagacacttatggtacatctcgggaatgaactgcactagtgcaagaagaataccgactagcagaggcacatattccagcaggttcacaaacacagcatcacgtgaaagcatgacttcccagacatgggcagctcctttcagttccactacccggttgatgcgtaacatcgaatatcctgcaaagcctagagttacaatgcaggcaagcagcaggtaccagcgtgtcttgatccattctttaaaaaatatagcattcattttatcttcaatatctttttaggtgaatttagtattttccagttaggccgatgaaggcgtcttccagatttacagtctcgcatttgaggttgctgtagggtgtttgcatcgatttcagatgagtttccgcttccggctgttgcaggaatgagtaagtttccagcgtattgcgtatcacggacggatggtagaaaacgtctgtttctggcaatttatatccttcgggaaccgtgcatgtatatcggcgtacgttgtccagcaattcttttatgggctgttgaatcagtatttttccataatccatgatgatgcagtcgtctataagacgttccatatcctgtatgatgtgtgaagtcaagaatactgttttgttttcggaacgggcatagtcgcgcaggtagtccacaaacaggcggcggtatcccgggtctaagcccagagaaaaatcatccagtaccagtagttccggattctgcgccaggattagtcctaaagctacctgcgagcgttgtccgcaggacattctcgaaatacgctgtttcggcgccactttcagtttgttcattaattcgtagtaagcttcctttttccattgtttggggtaaaaagccgaatagaatttttctatttgctgaatagtcatgaactgatattgcacgtgtccttcgatgagcagacctatgttccggcggagagagggggccatagtctgaatatcctgaccgaagatggcacattggccggaacgtggtttgagataaccactcaatatattgatggtagtggtttttcctgtaccattttttcctaacagtcccagaatacgtcctttgggtacggtgaaactgaggttctcgtaaattaaccgtttgccataataatgcgtcaggttattacattcaatgatgttctccattgatttttgttgttatggttataaaaaaagaaaaagaagggggataataatgcctgctgctaattctatgcctccccgtccccataatcctttcgggccttttatcataattataccggagacggtgataataatgagtcctgcggcaaataagtcggcaaaatgagtccaccaactaccggggttgtaatgcagctttgtgagcgcgctcagtagtgggcgtcgtgtcagcttctcataaacagcatgccgagtggataactctaccactaaactggacccacctttcaaaaataccttcattaggttttcctgtggaaagtaatgtttggtgtaattgccctcttcgcctagcggtaccagcaatttcagtacatcttccttcttgaagtcagactgcatcggaagtatttcagtaatggcatattcctgcctttccactgaataattcggattaatggtgttccggtgattcatgacaattccggaaatggcataaatcaataccattccggaaaagaaaaatgaaagatcacgatgaatgacacggctccacttgcgtaaagtgattccggccttattgaatttcataatccgtggcttccaaataatagaatgacaaataaggttttccgctttctgcttgtcttttggctatctgggcgcggaagtcggcgatacgtttttccggtgtattggcggtttcaccacgagctttcttctcgctgctgcatccaccttcgctttcaccatgtttctccgcattggcagcttttagttgggcttcccattgttgcaggtaggcttcgtccacgcgttgttctttcagcgtgccgtttacgcggacaatgctgttaacacatttggtgtcgaaagagcctaatttaccagcttccacacgaatcatctgcgtgtcatcgctacccattaggaatatttttgtggcaccatgcttgcaggcgtgcgtacatacaccttctatggtaacggcttggtcagccagtgtttctgcattggcgagcaggctgtctatttccatagcgccggactgttctacagcggctgtttcattagttttagcttgcttgttgccacaggccacgaacgtgaatgttgttgcagcaatggctgcgaataaaagaactcttgttttcattgcgatgtttattaattagttagtaatttttttagagagataaaccgacatttacccaaagggaggttcctttctcactgttggtatatctggcttgttgccaacccgcttctaagtgagccagcatgtttttgaatacatttttggaccagcgtaatgaaattccataactggtatttccagaactttgcatatcgaaattctgttgcaggatggtcattgcataagggtgtgtcacttgtccgatatccagggttgcatctaatttttcctgatgtgctccccaaatacgcacaaagagcatatcctgtttccatctccaggtagaagtgaaagctaaagaagtatcgaacagactgtattccacctttttagaaggacttttataggtatctttcctgtagtgataacctacggctggttgcaggctccagcgccatactttagtctgctcctgctcgtaaaaagccgataagttactccagagtcgttcgcttccgaattgttgagcggttgcaatctgcggataaatactattcacagcatctccataaagaatttctgtacctttccggtcacggaattcagcatttgcctttattccccaattatgattccgggtagtggcagaagtccaggctatttctccctgatagcgatcctcgtccagctcgttcagtgtgagatcgtttgcgccaggcagaatcttttcatagaaagcgtgctggtaggaaaccgaacttgtccagcctccatcactttttactggtagcaaatctaatcctgctccgaagatatggccctgatacctcaccgtattgcgggtaccgtcgaaacgcgtatagcttgttcccaggccggagagatggaacgttttcgatactcccagttcattataatatgtgatatccccattttgtttgtacttatgggcttcagcggacaaagccacggcatatcgtttattgaattgataagaagcaccagcttttccctgtaaatcggcaatggaattacgtggacgcgggtctacatccctgtattcaagcagggcgcggtatgagaattccccgccaaatgtccatcgtccgtgagaagcagcatatccgccttcgaagaagtaggtttccgattttatatctcctcctatggtgtctgccattacgtacgggtagatgagctcgtagtctgcactctcgttccactgtacgttctttcgctctccgttgtggtagtaagcgttgccccagatgcgtgaggcatccgacatgcggacatatgagtcggctgctaccttgaatccaccccagccgtcaccttcctgtgcgttcagggcgcggctctcattgtcccagtctcccgaaatggaaagtgaagagtatgagtcggagtagcggtaatagttaagagcagggttcagataaggcgttattatgaaattttgccttactgctgagcgctcataagcccgtttctgaatcaagaccgtgtcccccttttgtgcaaaggaggatacggtcgctacaacgaggatgaatgaagatataaatcgtaagatcatcttgttagtgagaaattgtgattactcgtgaaacttgtaatacggatcggcaggttgttcaggcagaaaatctacgctggagtcgtttgtatcctgcaatgttttaccggaaagtactttgcggcgcacacttttgccataacgcgtcttgtcttgatttacctttccacaatacgtccagcctctatccagtgcaggagatgttacattccatacgtattcgctttccacactgagattcacagcatccagaatccatttgttaggaatcttgtaggcgtcaccgctcataggatagacgttaccaccgataatcatgttatattcgtaggtgtaagcatagtctttcagataatcctccttactgagttggttgttttcgtcatctcccaaacgtgccagtgcaaatgaggtaaagccacggttatgtggcccccagatggttgctgtataacagtatatcttttccaagttcggaacttcagtgtctgtgtcttcaaaacttggatttgaggatacatcgtaccattcaaagtcagcctttgtcaagtcgaatgagttactgttggcaactgtgtgatccatgcctatatcgcataacagcaaagattcgccgggaggaaccatgatctttccgcctaacgggatacgataaatggcttttgtggagaatgcctcattcatgatatcaggtgtgtagtcatatttacttgtagtcatgaaggctgattcggcgattgtcaatccgtctgcgcaaagcgtgtcgccggagttgttgtaaatacggaagtatttgtcaccggtatattgtttctcttccggagtaacgctaccggtgaagaaaatttcggcgataacgaaattgcctccttcttcactggagttatatacataaccggttacgtcgaggggagatgtgccagtagcttcggtgaaggtcacagattcctggtaggcgcgcatttttgtgtataccatttcatcattcagcttataacttagggaaccttccatactgatggtatataagccctcgggtacacttaccgtgatactggcattggatgtagttacacgggtgccgggtttcacaacagaagttgtttctccggtattgatattcttcagggtcagctcctgaataccgattgtagggttgtaactctgcaattcagacggtgcgttgaaatgcaatgttacattggccagttttacactgttgtcatcatcgtcactacaggcggtgaatgccaaggctgcaataaacatgcaggctacgtaaaggtaatgtttcattttcattttctttttctttgttatcatattaaagttttatattaagttccatcccgaagtaagggctggctgctgttcttctgatgaggtatccttttttggtataatcgggcacatagtccagaatgcggtcggcaaagagggctattgacagattcttgccgaagtctttagttgccttgaaattgacatacatgtagaacgggtcggtactcttttcgaactgttcctgattatagctcagtgtcagatgctgtttataagtatccgtcttgtccgcatccgtgtatggcgacacggttcctgtggcatctatgtacgagatgggcacaccgcttctctctttagtttgtttgctgtagaaccaagtgcactctacggtggccgaaagttttattcccaatttgtccaaccaggtgtctactatgaagttgctgttgaactgttcgtaggaataacggtcgtccgattcgtaaagacctatatacatatcgctcaaggcgacattgccgataactttcgacacagatttctgtatgggcagactattctcgtagttggtacgtagccaggcaccgttaatggtgagtttagaatttatttttttgaaacgttccgaggcgaactggaactcgataccttctttcagcgtcagactgccgtttccggtgtaagagtatccgttcagtacgcttacctctgagtaaggcatgccttccagtgagggaggtcctgtcagttctgaaccgtctatgccgctggcatcgtattttttataagaataaggggaataattcgccatcgaacggaaaccggaactcatgcgttcgcgaaaataagtgatggagaaatcgttcctgtgaaattccatgcccaagcgcacttcccatttaaagttacgtgctgccttcaggttatagttcaccggatctacgatgtaagtacgcagattcatgcgcttatagtccggattggcgttccaataattcagttgtacgaagtccatatacaacttgttggggtacaattgcgccaacgtaggcgttttggtcaaccatccgaagccgccggaaacgtttatattcaagtcgttattgccaatgcctattgcagggaaactccattgggcattaatgcgcggatcaaaataaggcttgccgctgagggcataccggctgttcaggttcagcagcatgctgctacctattccggcctggacttccaggtgatgcttacctatgggaatacctatctgatcttccacgaatagtgcaatttgctcgctcgccggaatgtcactgtacttgcggggacgtgtataagaactgcccgggttaagtgggcggcttaggtcgtacacttgcccgtctcctagatttttggcataagtccatgaagcacctacttggattcggtgtgtaacgttccacgtttgtaactcgaactttgtttttaccttggcatataaatttagaggccttccatctacagttacgtgagcagtatatttataaggcagtatttcagcgtcatattcaccttcttccatatgggtgggtacggtgcggtcgcgatccaactggatgaacttacttcgttctatcttatcccacgacatgttagcagacagatccagtgtcacccctttgaatgctttgtcctgtggggcaatccaatttaacgaactgttccatcggccggagtgatagctcgatttgtaattgtcttcttgttgtgtttgtatgtccgggtcggtttttacattatctatattacctgaataactgatgccggcggtccagttcaagcgatgttcatttccaagcagccactttttgttgaggcgtacggatgcattgatgcgcttgaaattgttgaggcggtcccgcggatcattgtacgagtcgagaaaccctgcatctgctgacagaacggttctttgatctttccattccacacctttgcctatggaaaacagtttaccgtattgatctgctttgatgcgtgcctccaccggggtggctttctgcttttgcttgataatgactacaccactggtcaggtcgttgtattccacggaaggaataccgcggatgatttccacgctttcgatgttatcggtggaaatgttacgcatgtctacgccggcattcacggcgttatatgcgtcaaacgtcgtgttggggtcagtgagcaaccgctgcatattggcatctgtactgatgggagcaccatcaatgatgaacttggttcctaaagaagaagtattgtagttggaactgctggtgcctacctcgcgcaaggtaatgtttttggcgccgttcatcttgggatcgctggtcttccctcccggcaatagtgccagcaagtcagagaaacttgtaggttgcagatgttccattgccgtgcggtctatcttcgaggcgctggttattccttttgactcagaagctgtcactaccacttctcgtaatgcagtggaagacggtttcaacgagaatatcaatgacatgttattagtcaggtcgatggatctttcctgtttctcatatcctatataggagactgtgatatggtagtgtccgctctctatatgggtgatattgaacctgccgttctcgtcgctcgtacttccgtagaatttgccttcatcggatttcatgcggatagtggcgaaaggaaggggctctttctcctgggcgtcaagtatttgtccgctaaatttgtaaaacgattgtgcggaacaccaggtagtgaagaacaagaggtaacttagtattatgtatatgactttacgcgacattgatttatgcactttttggagttgcaaagttattggatctgtgcacgatcagcaatcgctaaaagtcggtatattttctttaaataacgtgaatgataacaatatataggtatttcaaaagtacagtttctataaacctgaaaggccaatgttgggtaaaatgaatccgatgcatgtatcatccgaccatagccatacaaactgttcgtctgattggagaatatataactgtgttatcccgtcgagcttgatacccatgtttccttccactttcccgtctgtcctttcttgccccgagggaagggcattcagttgaagagctgtgtattgcttcccttgcgcatcctgtatgcgaaagagcttttgtgagggattgcaatagtattgatgtgcctgcttgtcgaagagcaataatgctttcccgttctggtagattcctatttgcgtggaagatagcaggctgttacgttcttctttgtaaaggtcattttcatcttttgagcaggcgtatagtaaagagacgctgatcagtagcaggatatatttgaatgttttcataagtatttctattattggatagtgatatattgcataatatactctttgttgccgtccgaacgggtgatttctgcctggatactatgttctccggtttcgagtctgatgtagtttttactttcctttccatctatataccatttttcggcctttatatcctcgcagtccgccagatggaacaatatgggattctccgaactgttgactggaatcgactgctcgatgcgtgggtagtagagtcctttccgttgggtagtaaccgagagtgtatgctctatttcgttggaatttaggatagtgacttcgtattgcttgccgggttgcaaaccgtttatatgacattctgttgatgtagttgtttgcgaacctgcaacctctgtacttcctgtcggtttccaggttactgtccatttctttccgatgttgtcttgccatgtcacaagggcatcgtattggtatgcttgcacatgatagtcagacataccgaagtaagtatcatccacagttagcaagatatagtcatcaaccgtggcgatctccaatatattcacctttgtgttcccccctttccaggagcggaaatctttttgtttagcggacataaggctggtcactttgtatacgccgggaaagaagctgtaacgggagtaatacacagcatttgtcgcattgggatacgaacagactactttcatgcactcgtggcctgctatggtatttaccgaattgtacgtcagccatttggagggtgtggtataatctatgtgatagactaaaagccccgatgtgccctggctttcgtgataactgtaataatctggaatatcccatacattgtcgcccgtaccccggtattccagcaggaaataatcattgtccgtatcggttcctatcagataacctttatcctgatggacgggagccaggcggaattcccctgaggtattcagaacttcaggctctgcccaacctatcatccaacgttccagaatgttcagtgccggtggagtacgactgtcgttgttgtagctgccactggccatcagcgaataggtaccgggaccggcagcctgcccgttggtggtgtaattcgtatcataaagatcaggccatcccagaacgtgtccgaactcatgacagaacgtgccgatggaagtgaatttgttgtttccatctttgtacttggagagttctccggcacaggcctaaccagcgagccggttacctccgaaagtgtaagtgcccttatatgctacgctgtagcggtgaggccaaataccttcaggatcgcttccgtccgcttcaccgccaccggagtaaaagacgaatacgtcacgcatgacgcctgcttcggaataaggaccaaagtcaatgccgttggcgtaggccatccggcagacgtctactaccatttcgtaggcaagttcgtcatcattggcggtgtagtagctacgttcgtgtggcagtgtataaggacctacaactacaaattccgggtcgaaacgtccgttactattgtcataatagtattgccatgcactgcctgttgcgccgttctcactgtaatttttgctgttcagcatatcttcgaagtgtcctttgctacctatagtaaaaggcacatccggaaattcggctaataatacaagtcctttttgcttacctgtggtagcaaatccattatctataaaacgttccggcggagtgaatccgtttattgttcgcgtgttggaagagttgcttttattctgggcactgcgcatcatctgctgtttgtgggctgtgggagatagggggcgaagtccttgtgtgaatccttgtcctaactgttgcctttcggaattgcttaatttacccatcggacgtgctttgacaccggtagaggccaactgcccgttgggtgaaagggttgcataataataatctccatcagatccggaagtcagcgtatagccttcttcagatatagtgtaatggtaatattcatctccataaatgcgtattttgagacgggtaccgtcactttgggttacggtgataactcccggccgggcagggatggcatatagcagattgcttcctgtaaagagaagagcttggaatagcaaaaagggtatgatgaatgattttgttttcatgtgtgtttttataaagattccatagtaaattcgaaatataatttattacttgcaaagtaccgctatatttcccttttgaacaatacctatgtttaggtattttgtgcttgttgattagatccgttattataataagatgatgttcttgtgtctgaaaacgacaaaagccatcccccagaatagacaagtaggggacggcttttgttgtcagtgtgcttactattattcagcaggctgtgcaggtgtttccgttgcaggagtaccgttggcaggagcttcagctttgggctcttcagctttcggttcttctgctttgggttcttccttggcaggctcagtggctttaggctcttcagttttttccgttgccggttgttgctgttgagttttcaccggatcctgagcgtttgccacgaaagaaccaccacaaacaaacataaacagggctgctactaatactaactttttcataatcatttgcttttttagaattatactaaatatattttatagttgaaagtttaggtttcctttttgctttaggaagctttgcgcttacgtaaattatagttgcaaagcacgtgccagaagatatgaattttaggtaaatggttgataattaatgatgaaaagtgagtggggaagtgtggcacagtgtggaattgtgtggaaagtgtggaatggggtgtggaaaaattccacactgaggctctgctccgtaccaagactataacaaggttgcaaattggataccattatttatttaatagaggagttctgaatcggttgatattttggaaatgtacgggtgtggagaatgatagcatataaacctgtaaagatggataatagatctataatgatagataacaaaccttttatgataaataataaaccgttttctgtgttggatttgattactttgcatttataataaaacatctataaaactattatgattgataattctcagacccctaaaatttcattctgcattacttgtaagaatagactttatcagattaaaaagactcttcctcaaaatctagaggataatcgcagattgcaagaaatagtagaatttgtgctcgtagatttcggaagtacggacggacttcgtaaatggatatctgataactttaaacatgaaatacggtctggatatctaaagtacttttatacagaagagatggtttattggcatgcttctatagcaaaaaatactgcgcatatgttggcgcaaaatgatattttagtaaatctggattgtgataattatacaggaagtaatggtggttggtttgttatcttgcaatttataaagaatgatggacctatgtttttgcaccaatgttctgatgatggttttgacggttcatttggacgtatatcaattaagcggaatgattttctatccattggaggatataatgaaagtttagcacctgctggctatcaagatttagatttaatcaatagattgatggcgaaaggttacagacgtatcgaagtgaaagattccaaatataatagagcaatcaggaatactaaagaagaaggaattgcatttactcattcatcattcaaaacatggcatgaaatggacgagtataatgcaaaaatttcccaatctaatattcttgccggcaaacttatcgctaatggagggagcttcggtatcagaaagaatatttttgatatagaaggaaatgtgccaaaagaggtcgattctttgaaatatgcccataaaatctctttcaatattacttgtatgaatcgccttcatcatattaaacagacattgcaacagaatattcacgataatttcttatctgagcaggttgaatttaatcttttggattataattcaacagatggattagagagatgggtaaagcaacagggtgaattgtttgatacaggcatattcaactattacaaaacgatcacccctacttgctatcatcgaactcatagccggaatatggcattccgcctgtcaacaggagatattgtttgtaatttggatgctgacaactatttaggtgaaggatttgtcgcatacatattgaatcttttttgtgtgtctgatgaaaaagcattttatactccaaggtattcagagagagatgttattgggcgtctttgtttatggcgcaaacatttcttgtctgttaatggctataatgaggcgcttcccggatacggtttagaggatattgaattgtattaccggttatggaaatccggaatagagcaagaatttattttagaaaatcgattctgcaaagcgattcatcattctcatgaagagcgtgtttcgcaagaatatatgggaaggcatataatagaaatgtatttattttatataaatccgtatcagacacaagtattgctacgatatcaagacggtagttattctaaaaccattttgaaggataatatttattgtaactacaaccgctcgtcccattacgagaatatcaatcaatattttctggatgaaaagaatagaataatcggtggtaaaaatccggaagggggacagtgggaagatattgaaggctgtctgtcttctttctatagagtggataatgttgatttgcaatcggaaatactcgtatatttatcagaaacacaaaacttttgggaaattgaaagatatgagtgtggcggactatctgtcaatcccaatggctttggtcaaggcattgcctataagaactttgattacgataatcctatatttttaaagtagttatgaacacagaatttattcgagagggtaatagaaccttgtattgcttttccatattttatgctcaggatgagtggggaagaattttacctttgctacatacttatatgatgtccaatcctgacatccatcaatatatgtttttcttgtcgtatgagaggggagaacatattaggttgatattctcttcttataccgtacatggagcgatcttgcaggaggctgtttatcaggctttgaagaagattgtggagaatcatccgtcctgtgagttagtacctactttttatggaaaagaattgtgggcgcatcatcctgctaatgccgtagtgagaaatgcatttgagatttcccgatatcaagtatattgcattccatatagcgcgttccttaatttaacatcattactcattatacgtctattggcgaatgattgcagtgaagaggggcgtacgtctgtagcgctatatctgtatgttcaattatgcagatcttcccgatttgtttctctccatgattatcttcattcacttcatgttccggattgtacagaaaatgtggaagaagaaatggagcttattagcttctattgggaaagtaacccggtagacgagtttttatctgatatgacgacattttatctttggcaaaaagagagggagtttatatattctatattgggaattgcagatggatttacggttttggcctataatattagagggcaattaggcttaatggataaaagttatttatacgctcttagccttcttaaaacatggagtatgtacacgataaaataaatgtaattttatggaaatatttagagaactacaatctaactctgatgggataatggttatacgatattcctatatgcaaatgattagatttgaggatattgcttgtgtctatacggatagaccatatcttgttattgttactaaagagaaagtaaagagccatttgttgcaattttctattaaacaaatgattgatattcttcctggtaacttttgtatttgcaatcaatcaactattgtaaatgttgattatttgactgtatggcagaaaaggaaagaagagtattggatacggctgattactgatcatgaattcaaagtttcaagaagatgtagaaatacgctgaaaggtaaatggagattcgtttacaagttgccggaagtggaatgggttgtaaccgaatagtatctaaaaactgaccgaattgcatatttgtagtttgcatgtgctggatgtctggttttaagacttatatttgctgatatagaaaaattattattcattaatttatgaacccatgaaaaaattaggaaaattaaagctgaacaatttcagtgaaatgagtgaacaggaaatgaagtttgtggtaggtggacaattcgatccaagtgctaaaaaaaagtgtgaggagagtctatatacatgtaatggagtgtgtcctcctaaatatggaacttcatatgggacatcaacgttgatctctcaaacttgtacaccccaaaaggattttatgacaaaaaaagttgtatcgtgcttctgctcttaatgtagtagcattttgcatattctcatttaaattagagccgtctttcttttagaaaagaaagatacggctttataaaacacaattgcatgtataaaatgaaaacaatttttgtcatattgctgtttgccgtattttcggtgaaatgttatgcagataactctgaaaatgttgttgatactactaaatatatatttattttggacgataaagttattactgcaaaatatatgtttgaccattggaatgaaatagaatgggttactactgctgatacagtgcgtgaagctgtatttacaacagcgggagaatatagaaccccattttacatgtttcgcactcgtaaagaggagggaggaaacgaatgaaaagaataataattttaacgatgcttcttttcccttttatcttggtatgttcacaaggaaaataccatataaacggaatcttaaataatgactataatggaaaatatgtcaaattgttccaatttcaaggagatactttgatcacttctattgactctgcaaaagttcaaaaaggtaaattctcttttaagggtaaagctaatgttgacgagttcgccattgttactattgggaaatatccatacataaaatcagtagaagttgttctggaagagggagatattcgtgtatatatggacactgcttttgttgcatccggaacacctcttaatgatttgcgcaattcattgaatagtgaagtaacacggctttgtggagtatggtatgacttaatgataaaaagtgatacgatagacgttgaaagagataaagcgcacgacgattatcagaaattcatatataatgcaacgatagaaaacagattgaatttagtggggcgaagatttattgcagataataaatcagcgatttggccacttgaaaacctggttaaactccatgaacaactagaagccttacaaaaaaataattctttggtaacacaggctgatatcaagaagtttaaggaacttttggataaacaggctgcatttacgaagaaacaagaagaaactgctaattctcagtattttgatttcgtattacaagatacacttggaatacaaagatctatatccgaatatgttggaaaatcacgtttgctttttgttgatttttgggcatcttggtgcagtccttgtcgggcagatatacctcatattaaagaggtctatgaaaagtataaggataagggattaaatgtcttggcaatttcatttgatagtaataaagcggcatggaaaagtgcgttgaaaaaactgaaaatgccttgggaacagcttatagaagtgaatggcaccaattcggatttagcgaaagcttatcaaatatatggtataccttatggtatactattagattcagaaggaacgattatagcagttagactccatgctcaaagtttagaggaatttttgttaaaagaaggcttgaaataaatatgaaatctaatatatttactgtctttttagataatgccaaacttaaatatacaggcttttcttataaatattacgaggaacatccctataaatatagcatgttgggattatccatgatgttgaatgattatggaattgctaataaaggtgttcgtacccagacaaaggatgaggctgttaaagaattagtgcctccttatatcgctcatataaatcatgattttgtaaatgtttacggaaagacagacgagaaaatattctatatatggagaggagtggatattaaatcgacctataatgaatttgtcaaagtatgggatggtattgcattgatagcggaacctgacgaaactccggagaacctaattatggagagaataagaggaaagatttatggcatacaggggtacaaatagtgttgggatgttctgtcatgatgctatgtttattgttttattggcagaatgtatccaatagtgtaggcactaatttactttttttgctgaatattgttggaatatatataggacatttgcttgcaaagaaacaattgaactttaatagcaggtatgctgataaattatgttctctgtttagtaagagtgactgtaataatgttttggattccaaggctgcaaggctatggggactaattagttggagtgaaattggcttaggttattttatctcgaatatgcttatcttgctttttattcctcaatatgtagtatatgtagctttgttgaatttgtgtactataccttatgtcttttggagtatctggtttcaaaaagtgaaagtgaagcaatggtgtcctctttgtttgttggtgcaggctttgtttataggaatgctgattgtggatgttgtttgtggatatatattcatgccggtaattcgcctgaatgaaatagtatatgttgcagccatttatgcgataccttttttatgcatccatctggctatgtctgctttttctgattttaataaagaaagaggggctaaatatgaactggaaagcttgaaaatgcaagaagaagtttttgtcgctttattaaaaaaacaagcgaagtatccggttagtaaatctacatcgcaaattatatttggtaatcctaatgcggatttacttattagtgtgtttagtaatcctcattgtgaaccttgtggaagaatgcacaaacgattacgagaattgcaaaagaaattggaagacaaggcttgtattcaatatattttcagttcgtttggtggggatttggatcaaagcaataagtttctgataagtgcttaccaaaataatacaatagaaaattcggaagaaatttatgacctatggtttaatggcgggaagtataatacaactgattttttaaataaatatcaatatgatattaatgcacctgctgtagaacaagagtttaggacgcatgaggaatggaaaaaagagacaaaacttatggcaacgccaaccatcctaatcaatggttacgaattacctgatgtgtataaaatagaagatctgatattctttaaagatttgcgtattgaaatgtaatttataattgctgattttaaaaagagaagtgatgaaaaagttaggaaaactaatgtaagtgtctatgattatattgagaaacagtgtaaacacaacccttggttgaccgctgaggatatgtcttgggcaaaaagaaagacgaagaagagcaaagaagacacatgcagctggagaaattcatagatatcgaattaataacccttgagggagaacgaaagtggttatctgaatatgttggacattccaaattcctttttattgatttctgggcttcatggtgcggtccgtgcatagcggatattcctaagataaagcaagtatacgagaaatataaagataaaggcctggaagtgctaagtatatctatggattatactaataagagttggactattgcaatggataaggtggatatgccatggaggcagtttgtattaccggctaattctaaagccgcagaattgtacgcttttgctagtattcctcatggtattctgatagatcaggatggaaagatagtgcaaacttcagtgactggattcttcttgaatgtaattctggaagcattgttgaaaggggaataaaactagtatgtaagaatgagaaaaacctttccacattattcccaattggatgcaatggattgtggggcctcatgtttgcggatgatagctcagtattatgatcgcaaatattcattgcagaagcaaacttgttattgatggtgttttcggtctaaagtctccaataaggcgtattaaaagaaaacgtagtccggatattaaagtgctttcagggcaaattataaaactgctggattctaaaacgcttgcactacaattagggagaaaggcaagaaaacgttttttagaaaattatgctcttgaagtgtataagtaacgcttaaaaaataagttggtacataagaaagtatggcgagaattggtacgcggactacgcggataaggcggacgaactgtttattttaaaacctatataaggtcgaaatattatcaacccaagtagattctttatcatttttacacattctgatagattttagaagttttatatcagattttaagcccgttatagtcaaataccatctatatttagccgatataataagctatgagaaacatcagatttatattgtcgtatacgctctattagttaataggacacccgataaactatcactaatgattctcgtttcaagatactgattataatgcacaacatgcaaagagtggcgtattatcaatatgtagaattcttcatgaagttaaattatggtaatattagacatctccatagcagaaaatgtgataattgttaataaatgtaataaaataatataagtatgaatatacctaaattgtcattttgtatcacttgcatgaatcgtttgaatcaaatcaaggaaacactcccacaaaacttgagagataacattctattcaatgaaaaaatagagtttattgttgtagattttgccacgcctggtttacagcaatggatcaaaagtgaatttgaagaagaattacgttctggttatctgaaatattactatacagaagaattgcgttattggcatgcatctatagccaaaaacacggctcatttgcttgccaataatgacattttagttaatctagattgcgataactatacgggatacaacggtggatggtttgtcatctgtcaatttttgaaatatggaatgaatttggtacttcaccaagaatccggcgacccttttgatggctcttttgggagaatatcgatatgtaaaaaatggtttacagctattggagggtatgacgaaaactttgaaccgacaggatatcaagatgtagatctaatgaacaggctgaaaatcagtggatgtcactatattgtaatgaaagatgcagaatataataaagctatttataatacaaaggaagaaaatattctatataccaattctctttataatacttggaaagagatggatcgacacaattacaacttatcacaagaaaacattaagaatggacacatcattgccaataacgggttattagcaatccgaaaaaacatatttgatagtaataataaacaggtattttccatagggcagataaaaaataaaatatcctttaatattacttgtatgaacaggaggcatcatcttgagcaaacattggtgcagaatatagagaaaaatagtatcccaggacgggtggagtttgttttattagactataactctaccgatggattggaagagtgggtaaaagaactgcaatattacatagatacaggaatattggtttactatagaaccgaagaaccattgaactaccacagaactcatagtcggaatatggcttttcgattatccactggcgatattgtatgtaatctggatgccgataatttcttgggagaaggttttgcttcttatatcttagatatttttaaccaaggagatgaaacttttttctgtacacctcagtattcagaacgagatgtaattggtcgtatatgcgtacgaagaaaacattttttcacagtaaatggatacgatgaaacattatccggttatggattggaagatattgatctttataatcgtttggaaaaagttggtttacagcaaaggttgcttccaattggaaaatattattcagccattcatcattcgcatgaagagcgcatttcacatgaatatatgggaatgcacgttgaaaaaatatatttgtcttacctaaatccatatacaacagaagttttgctgatgtataaaaatggaaaatgtaataaagcccttttaagagataaccctcatttctatcgtaatcaaactatacaatataatagtcagaatgaatacattttaaacagtaaaaatcgtatccaaagagaaaatgattgggtagaaatacaatgggcaagcctaagtgaaaaggcatccttttacgaggtaaaaagcaaagaactttggtcaactgtattacttttcctttccgagtcgcagaattgcgttgagataaacgaaagagataacaagaggagagttgtgaatcaagatggctatggtcgaggcatagtttacaaaaatttaaataatgaaacgcttatagagcttaaataaatgatattatgaagaaatgttgcatagaaataaatggattgccttggcactgcttttccatatattatacatccaatgagtggcatcgtattttacccaatattatagcatacatgaaagaacattgggatatttatcaatatatgttatttctttcgtcagaccggggagacaatatcaaactgatgtttgcttcgtcttctggtcatcccgaagatgtacaagataaggtatctacttttctacaccatttggtagatgtttatccttctacagtagttgacacaatgaattatgggtttgagctttgggcacattatcctaacaatagtataattaaggatgacttagctattcccaaagaacttatttacacacaggacttatgtgtaatcggacagttacaatctcaattatttgcatctttactaaatgatgatgcttctgaagatagtagaagttccatagctttatttttatgtatgaatttgttacgcacttgtcaatcttcagaattggttaccatttttgataacttagaagaattatctattgagaaaataaacatagagatgaatttgatggacgcatattgggaatacaagtttgatgaccaagaaaaggagattgtttctcagcttttaaaggagataagtagaaagtatgtacttggcggtatgaagactggatttcacaatatgtgtgtacttattagtcagcaactaaatgtatcggacatggcatccatcataggaatgttaaaaatatggtacaataatagaatattgaaagatttaatctcaaataaatcattaactaattaatttttatattatgaagaagttatcaaatttagaatttagcaaaatgtcattagatgaactaaagcaagttggaacggtactagatgctgaagaccagagaaagtacataggaggcaccagcatatcagaagcttacgctatgatgaatgccggtacgtggactggaggatatgttgatggaatggggtatgtatcagcccaatcctttacatttggaggaggatatgacagcagtaattattttgcaacatcttctgcatatacaagagaccaaaaatctagtgcatggaacaaatttgtggaagaatttatgccaagtggcactggcatggtaggaggtcatatggaaaatttggcactagaaggaatagctcgtcttcaagacttaaactataatggtcctatttatgtactgtttgatagtaatgcatttgtaggtaattatgggaatacagttcctcgtttagtaatacgttccgccatgtctggtgaagtattatatgattcgcattggactagtggatatggtgcaaccgggaattattaaacaacatttaaggaacattttatagaagttaaatgccatggctcaataatatgaatgctgcacatttaacttctataaataaaactagtattatgaatagaccaattcacccaaaaccaataatagttattttcttttgtattttctacctcaccgcccattgtcagcaagatcttttcaatttagattttcgctttgcagaacccttgcatttccaatggaaagctacacagattccaatcatcaagattgattctacccagttaatacaaggaaagcatcctcttatgatacttccggaggagatgcagcactctcttcttacgtttgggaacaataaccctattctactgaatctgtaccaaactttcttaatacctgcagagtatgcaaatgataccgcaattgtcagcttacatatcaggccaatagaaatgaacaaggtctatttacaggtaagagggatgaattctcaacaagaatttctacgtaccgactccgccaatgtaccgaacgacgatgagtggcaaactgttcgatgctcgttaccactaaaggatgtcagatatcttacaataggcatggttggcaatagtaaaatgaaaaataggtttgattttagaccgtctaaagtctatttagacagagtaaccgtacacatagcagggcaaaccattgaacagatccaccgtgacaatccatttcttataaaacgaccggatagacttttggacttagcttatatgaatgtatttgatgaaccggacaagagtatattacagaaaacagggcttcaggataagcgaattatcgccttaggtgagactgtgcatggaagcagtacaataaacgacaacgtattttcgataataaaaaacagcattttgtacgataattgccgcttggtactattagaaacagatatggggaacggcttaaaaatgaatttatatattcatgggaaattgccagaatctgccatcaaggaattgatacatgatactgatggcattctaatgaatcttcactccttagaaaacctccttatatggctgagagagtataacaaaaccgcaataacaaaagtaaatctccttgggatagaaggattttataataatcaaatcaatgcaatgtttgactatttatatgctttctataatgacatgaatagaaatcttttttatcctattttgacggaactcaaccgaatcgaatatgagtctgttttagatttggcagaacaagataagaaaaagttaacagaactcatgggataccatgaatatgagttattagtagatgtattaaaaggcattattcgtacacataatgatacaagaacaatcggaaggatatttcacgctcgtttaaatagagatttatacctatatgaaaatgctcgaaactttatagacaaattgctgagaaaagatgaaaaggccattatttatgcacattatggtcatgcacaaaagaaggaacaaacagaaggaactttcccttatatgcaaactatgggtagtagattgtcagaaaaattcaaagatgactatgcggtaatcgcattgactgtaggcagtggagagattcagacaagaagtttacaatatacagattccatttgtgcctaccaattggatactttacctgattattctttggaatctgttttaatggaaagtgctcaggatagcatatttatatttgtgcaaacattggatgattctgtttattgcacccggagcatagggaatgctcctcgctggaacagaaactacgaatataccaatttgcatgcttgcgctgatggaattatttattttaaaaacagtagaagaagcgaagaagaaagatcttttgattctctccgcatctataaagccagacaaaggcgtaaaattatagagagcataataccgattgacaatgaaaaacagtgaagaaatcctacccaaggagcaaaatcgcagtgaagaggttcaagccatcattgatcgtatgcctacccgtggagctatatgggtagctattttagtcggtgtactgataggagtcgtcttcatacttggatttatcatcaaatacccagatacagtagacggacaaattaccattaccgctcgctttgctccggtgcgtctggttgccaatagttcaggtaagatgcatttgttgatagccaacaataataaggtgacagaaggagaagtaattggctatattgaaagcggcaccaattatatagatgtgttaaagattgattcattactgtctgtatatgaaatcgattctattcgggaattatccgtttctactgcattaacactaggagagatttcttctgcattcactgctttcatgatagcacatagacaatattgccgctttttagcgtcggatatttatagagcatagagccaaaacctacgtttacagatagacatagacaaaaagattatcaaaaacatgtcacaagaggcagtgttgaagagacaaatattactcattagccaagaaagaacgataaaagatagtatgctcgttaaagcaaaagctattagcgaagaaaaatatcttcaccaatacacggaatttctttcacaaaaagacaactacgaatcattcaatagcgaaaagatgtcacggaaatctcaactctatcagaatgaattggaattgcagctgttaaagatggaaaaacaggaaactggagataggttattgacagatctgctagcacgtaagaatgaattgtgtaatatggtcagaatatggaaagagaagtacctgcagtatgccccgatagaaggaaatttagaatttctaggcttttggcgagaaaacggatatgtacagataggacaagagttattttccattatcccatcaagagataaaatgcagggagaagtcttaattcctgcccgtggagtgggtaaaattaaagtgggacagaccgctaatgtgaaagtcgagaattatccgtatgatgagtatggactgataaagggagaagtacagtctatttcccgcctagcacataaagtgcaagtagcggatggggcaaacacaaatgcatatcgagtgatgatttcttttccacagggattacagactaattttgggaaagacttgatgcttgattttgagagcataggtagtgtggaaattattacaaaatctaaaagattaattgaacgtctatttgacaatctaaaagcaaaaatagaaaaataaaacttttacttcagatgatattaaaacattttcctgttgaataccaaatggattcgcaagactgtggacctgcaagtttaaaaataatcgccaaacattttggacgatattattctttgcaatacctacgggatcgatgtggcataactaatcaaggtatttctttacttgacttaagtactggtgctgagaatattggacttcgaacattagcaattaaatgtacaatagaggaagttattactagcgtaccttttcccactattcttttttggaatgagaaccattttgttgtactttatcatgctgacaagaaacacatgtgggtatccgacccagctaagggacgtataaaatatacacatgaagagttccgtcgcggatggtatccgaaaaaggagaacaagggagtattattggctgttgagccgacagtagacttccaaaagaacaagcaacagaaagaaagaggaggctgtaatttaaactgtgtcagcaaagcaaacaaaaaaagtattaactttgctaacacagtttttttatgagtgaagaatttgattttgaaaggatcaagaacaaggcaatcgagcagctcaaggctggcaagcccttgttgggtaaggacggagcttttgccccgttattggagagcattttaaatgcagccttagaaggtgagatggatgcccatctttccgaggatgaacgcatgagtggcaaccgtcgtaatggcaagatgcagaagcaggtgcaaacttctatgggtgaggtgaccgtttctacaccccgtgatcgtaattccagcttcgatcctcagtttataaagaagcgggagaccattcttgcggaaggtgttgctgaccgcataatcggcctttatgcccttggtaatagtacacgtgaaataagcgactggatggaagagaatcttggtaaccgtgtgtctgccgaaacaatcagttccatcactgaccgggtacttccggaaataaaagcgtggcgttcgcgtagcctggactatatttatccgatagtttggatggatgccattcattataaagtcatggatgagagaggctgtgccattacccgtgcaatctacaacgtattggctatagataaggacggtcgtaaggatttgcttgggatgtacatctctaagaatgagggggcaaacttctggttgaatgtgctgaccgatttacagaaccgtggtgtacacgacattctcatagcttgtgtcgatggtctgaagggcttcccggatgccatccaaagcgtattccctgataccatagtgcaactttgtatcgtccatcagatacgtaactccatcaaatatgtcggcagtaaacaccagaaggagtttcttaaagatctgaaacgggtttacggtgcagtcagcaaggatgccgctgaaacggagcttcttgatttagatcagaaatggggagagaaatatcctatcgtcatcaagtcgtggcaggacaactgggaaaagctcactgaatacttccagttcacatccgatatacgtcgtatgatttatacgacgaataccgttgaaggctaccaccggcaaatacggaaagttacaaaaaacaagggcgtgttccctaatgacaccgcccttgagaagcttgtctacctcgcttatcgcaacatacgcaagaaatggactatgccactggctaattggggcacaattgcccaacaactggcgataaagtttggagatagatttaagttgttgtaattttacgctcgtcgggagtgctggtgcacccccttggcgctggccgatccccgaccgatgagcttgaaagaaaaacagcgcatgacacagtttactttacgcccccaagaaagagaaaaaaatagttttattaacatccttcgctacttcattccatacaaaaagagctttatgactatcttcgtcataatgtttatagttactttgtttcaagggatactaccatttatttcaaaagcagtaattgatgtcggtattaaaacgttcgaccttaattttataaatatggttttgataggaaatatctgtatcttattgagcataacgattttcaatgtaatacgcgactggcttctcctacatattacttctcgagtaaacattgcccttatatctgactatttaattaagctaatgaagcttccggttacattttttgaaaataaactgctgggagatatacttcaaagagcccgtgaccacgaacgtatccgtaattttatcatgaataactctctttcattaatattctccatatttacatttataatattcggtatcatactacttatatataatgcaataatcttttatatttttctggctggttcaatattatatgtactgtgggttttattgtttttgagtattcgtaggaaattagattgggaatattttgagttgatatcaaaagaccaaagttattgggtggaaacagtgtctgctattcaggatatcaaaatatataattacgaaaaacatcggagatggaaatgggaagaaattcaagcacggctttataaggtaaataaacgagtattgaatgtgacaaattcccaaaatatgggagcgcagtttattgaaaatataaaaaatatgtctatagtcttttactgtgctagtgctgtaattacgggagatataacatttggtattatgatttcaacacagtttgttatcggtatgttaaatggtcccttgattcaattcatcaatttcattatttcagcacaatatgccaagattagctttcttagaatgaatgaaattcatcaattggaagatgaagaagccccgttatctatcagcacctcaataatacctgcatgtcgggatatgatcttggaaaatgtacattttcaatattcagtaaatgcacctatgatacttaaaaatatatatctgcaaatacctcagaataaagttaccgctattgtaggaggaagtggaagtggcaaatctactttattgaaactgttggtgaggttatataaaccaagctatggtgagataaaaatgggaggcatgaatgtttccatcattaatttgaaacattggcgagaaatatgcggtgtggtgatgcaagatggaaaattatttagtgatacgattgtgaataatataatacttgatgatgaacatattaactatgaccgtttacatgaagtatgccgcatcgcacagatagaagatgaaattaattcaatgcctaaaggatatgaaacaatgatcggtgaaacaggtcggggattgagtggaggacaaaaacagcgcctattgatagcgagggccctatataaaaaaccagatttcttatttctagatgaagcaacaaactccttggatgtaatcaatgaacgaaaaattgtagaagcattgaataatgcgtttaacaatcgaactgtagtaattatcgcacatcggcttagtactgtacgaaatgccgatcagatcgtagtaatgaaccagggatacatagcagaaataggaagacatgatgaattaatggagaaaaaaggatattattattcacttgtttcattaaaagaatagtatgaaaagaattattgtaaaaaaaagtttgtcttatctttatgttgactttgaagacaacaggattacaggcacaaacacagatcactctagaaaaagttgtgaatgagtggagtttttattcaccttcggcggaaaagataagactgacttatgataacatatcgatgactcataaaaaatatttaaaaggttttctacctctgattactattaacataaatccagtttctttcaaccattctctccggctgatgcaaaactcaactgatggtagttattcatatgtgaacgattactcaaacacaagtaatacgggacttactattcagcagaaaataggtattaccggaggagtattttctgtcagttccaatttaaatgtgttgacagaattctccactcgtcgaaacagttttaatacaattcctttatccctaaactactcacaacaacttataggaggttattatacatataagaagcagaagaaaatagaacagattaaaacactcaatgcaaaaaggcaatattgttcggatatggcagaaatacaaataaaagcattggacgctttcttaaatctctttttggctgatataacccgaaaattggctttgagaaatatagctattagtgatacattattaatagtaagcagagctttattagataatggtcattttactgaatttgaatataggcaagttgaattacaagataataataatcattatgtgtatgaaactgcacagaaagattatcaacagtcacttcgtcaactttgggctctattaggaaaaaaagaaattatagataacgtagagataactatgcctaatttttcattgcctttggccattgattttgaaatagcgacaagatatgcaaaaaaaaataatccgttcgcattgttacaggaagctaaacagctagaagcaaagcaaacattgtttaatgcaaaattaagcaatcgttttaatgcgaatattaatgtcagttatggactgaatcaatatgcagaacacttttcagatgcttatcgaaaccccaattacagtcaaggcgttatgattaattttcagattccagtttttcaatggggaataaatcgcaataaaatgcatatagcaaaaaataattatcgtaatgcaatgctagaattggaggaagctgaaactagttattcaaatgatttatttgacaaagtgagttcttataatcatggagtgaaattatattttttatccaaacgctcatatcaattgatgcaggagcaatatgagattttatctgctaaatttcggtatggaaaagtttcaatatatgaaattacatctacccaaagagatttgtatgaagcattgaaaaagtattattcttctatgcagacagtgtggaatatgttcttcatgttacgtaaaattacgttatatgattttattcttcaatgcgaacttatagaagtattatgagtgcttatatttacaattaacagacaatgcagttttcgtagagaattcaagaactgcatacccgactttgaaaaagataggcaaaacattaaaatacattgagttttcccactttatgtaacgcttaaaaaacaagttggtacataaatgataatttagagggaatgggtacgcactttcttatgtaccaacttattttttaagcgttacttaattctctatttcgtaaagtttcagcttattgtataatgttttacggtctatgcccagtagttgtgccgcccggcttttattgtttcccgtttgccgcagtgcttcgataatctgatgcttttctgtctcttcattacgcaatggcaaacctacatgggaatgagtgatttgttgcaattcagttagttctttcagtgtaataagttggtcttgtgccaatagggtggcgcgtcgtaccgcatttttcatctgtcgcagatttcccggccaatggtattccagcaatgctttggatgctgcatcatcaaacccgatcaactgtttgtccagttcccggttggcttggtcgaggaagaagttggcaaagagaaggatgtcttctctccggtccttaagttcgggcatacgcagggtgaactcattgatacggtggtacagatcctgacggaaagctcctttctcgatggcttgttccaaatcttcattcgtagcggaaaccaaacgcacatctacagtgatttctttattggaacctaccggacgtatttttcgttcctgcaaggcacgtagcagttgtatctggacttcgtagctgagattacctatttcatcgaggaagatggttcctccgttggctgcaacaaaggctcctgttttgtctgtcaatgctccggtgaatgaaccttttacgtgtccgaagaattccgatgcggcaagttctttagggatggagccacagtcgatggcgacaaaaggctgtccggcacgcttgctgagttgatggatgcggtgggctacatactctttacccgttccgctggcaccattgatcagtaccgacattgtggtgggggcaaccagtcttacataattataaagttgcttggcagtatcactttctccttccagatagtcggaagacggagcaccgcctgcatttttctgatgggtactttctccttttccggaactgatggtttgttttggggaagcaacgggttgtttcacagcctcactgattttcttcagaagctcgtccggatttacaggcttggcaacgtagtcgctggcacctaatttcatggcttgcaccgccgattgtatatcagcatagcttgtcatcatgatgagtggaatggacagaccttgctctcccaaccacttcaacaggtcgatgccgtccttgtcgggcagacgcaggtcggacaaaatcaagtcggcaccctccgtttccaaatgtttctgggcgcgggcgatactgctgacggaagctacctgaaagccttttttgcctaaccaggtcttcagcatcataccgtaagtaatgtcgtcttcaacgatgagtatggatttcattgccttatcttttgtctcttttaagacacaaaggtaaaccgttttgtctgaaaatcgtatatttgcaaacttaatttaaataaaaagcgttatgaagaggaatttcaccgtattattaaccatactgatttgcagcgttacagcctgccaatcgggacaaaagaaagatagaaacatggatcaggaaactaaattgaagattgaaacaactgcgggtgacattatcgtgaaactgtataatgagacaccgcaacatcgtgataacttcatcaaactggcggaagagggtacatacgaaggtacattgttccaccgtgtcatcaaggattttatgatacaggcaggcgaccctgagtcaaagaatgctccgaaaggcaagatgctgggtgcaggtgatgtaggttatactattccggctgagtttgtttatccgaagtattttcataagaaaggtgcattgtcggctgcgcgtcagggtgacaatgtgaatccgaagaaggaatcatcgggttgccagttctacattgtgacgggtaaagtgtataatgatactacgttgttggggatggagaaccagatgaaccagaatcgtctgaccactgtgttcaatgctttggcacagaagcacatgaaggaaatctataagatgcgtaaggaaaatgaccaggatggtctgatgaacttgcaggatagcttgtttgcacaggctgaggcggaagttgccaaacaaccggaattccactttacaccggaacaggtgaaggcttatactacggtaggtggtactccgcacttggatggtgaatatactgtgttcggcgaagtgatcgaaggcatggatatagtagataagatacaacaggtaaaaacggatcgtagcgaccgcccggaagaggatgtgaagatcaaaaaggtgacagtattggactaaactgttggtgaaattagttcaaaacggtaagaaaagaacaaaagtgattagtgtttggtgataagtgattagcgccattcggtatgttattttttagacgcggatgacacggataacgcggatttaaaaggctgcgctataaacgtgaataaaaaaaagatccgcgtcatccgtgtcatccgcgtctaaaagattatttatcatttaactcataaccctacagaaagaaattcctttctccgataagtaacatcgctattttatgaaaatcaataaacatattctccctaatggtctgcgactggtgcattaccaggatctcagtactcagatggtagcactgaacatcgtctatgatgtaggtgcccgggacgaagatcccgaacataccggctttgcccatctgtttgaacatctgatgtttggcggttctgtgaatatacccgactatgatgctcctttgcagtcggcaggtggcgaaaacaatgcttggacgaacaatgacattacgaactattacctcaccgtccccaagtcgaatgtagagattggcttctggctggagtccgaccgtatgttggaactggcattcagtgaacaaagccttgaagtgcagcgcggtgtggtcatggaggagttcaaacagcgttgtctaaaccagccttacggagatgtgggacatcttatccgttcgttggcttatgaggtgcatccataccgctggcctaccatcgggaaggatttatcgcacatcgaacaagctacactggaggaagtgaaatcattcttttaccgcttttatgcacctaataatgccgtgcttgccgttaccggaaatatatcatgggaagaagctgttcgattgacagaaaaatggttcggcctgattccccgcaggaatgtgcctgtgcgacaattgccgcaggaacccgtacagacgcaggaacgcagacaggtagtgaaacgtcctgttcccttggatgcgctgtttatggcttttcatgtgtgtagtcgcgagcatcctgattactatgcttttgatattctttcagatatccttagtaacggacgctccagtcgcttgaaccgtcggttggtgcaggaacagaaattgttctccggtatagatgcttatatttcgggaacgcgtgatgcgggattgctgcatatcagtggaaaaccgtcagccggagtgtcactggaacaggctgaggccgctgtacgtaaagagttgcaggagttacagcaagtggcgatagaagaacaggaattggagaaagtaaagaataagtttgaatccacccagatattcgggaatatcaattacctgaatgtagctacaaatctggcatggttcgaactgaccgggcaagcggaggatatagaccgtgaggtagaacggtatcgcgcagtgacggcagaacgtctgaagacagttgcacaagagacttttcgtgaggaaaactcggtggtattatattatgagaaagataaatgaacagattaattgctacatacaaggggcattataaagccctcttttacttaggacttcccatcgttatcggtcaaatgggagtcattgttcttggatttgccgataccttgatggtgggacatcatagcacggccgagttggctgccgcttctttcaccaacaatctttttacactttgcattattttcagtaccggtttctcttatggactgacgcctgtggtgggtgagttctacggtaaccgtcgtttcatggaggctggacaagctttgcgctcaagtctgcttgccaatgtgttggtagcactgttgctgacgcttattatgactgtcgtctatttctgtgtggaatacatgggacaacccgaggaactgattcccttgataaaaccttattttctggttctacttgcatccctggtatttgtcatgctgttcaatggctttaagcaatttacggatggcattactcaaacgcagactgctatgtgggtgcttcttggtggaaatgcgctgaatattgtcggcaattatgtgctgatttacggaaagttcggtttcccggaatggggattgctcggtgcgggtatcagtaccctgttctcacgcatcgtcatggttattgcttttgcattgattgtttttcgtagtcggaggttcctgagatataaagtagggttcttccgcttgggatggtcgaaacagatgttcaggaaattgaatggacttgggtggcctgtcggtttgcagatgggcatggagacggcttcattcagtctcagcacgattatggttggttggctgggaactattgctttggcttcacatcagattatgctcactatttctcagttcacctttatgatgttttatgggatgggggcggcgattgccgttcgcgtcagtaacttcaaggggcagaacgatatggtgaatgtccgccgttcggcatatgccggctatcatctcatcttggcaatggcggtggtgcttctgagtatcgtgtttctgttgcgcaatcaggtcgggggctggtttacggatagcgtggaggtttctgccatggtatcttctttgttccttccattcctggtttatcagtttggtgacggactgcaaatcagctttgccaatgccctgcgtggtattgccgacgtaaaaccgatgatgttcattgcatttatttcttattttgttatatctttgcctgtaggatacttatgcggtttcgtgctgggctggggtacggtcggtgtatggatggccttcccgttcggactgactagtgcgggtattatgctctggttgcgtttccgctataaaacgaaagataaatgaataatgtctccaagaagaagatagctgccggttatgctgtcctgctggcagtcttgctttattccctgttcttcgtgcaccgggaaatggagaatcttatgagttcggataatagtgatattctgcgtacggacagtctgatagggcttttgagagagaaggatgctaataccgtccgcctgctgcgtacactgagcgaagccaatgacagcatgatttcagcccgtgaagtggaacagattattgccgaacaggatactattatcacccaacaacgtgtacaacgccgggttattgcccgtcgcgatacggttgtgacacaacccaagaagaaaagtttcttccgccgtttgggagaagtcttcgtcccaccacgcaaagattcagctgttcaggtgcaaacaacccttgaagttgctacggatactgtactcgatgcttataatccggttgattccctgcacgcgaagctgcgcactattgcccaacagaagagggctaccaatagtgtgatgcagcgtcgtaagcgaactttgcaacgtcttgatcatgcactgagtgctcgtatcgacagtcttttgaaaggatatgaacaggaaaccctgatgcgtgcccgcgaagaggctgagtatcagaaagctgttcggcatcgttctgcaacgattatttcgggtattgctgccggggctgttgtgctgtccgttatctttcttgtcatgatctggcgggatgtcacccgtagtaaccgttatcggcgtcaattggaagaagccaatcgttttgccgaagagttgcttgcctcccgcgaaaagttgatgcttgccattacccacgatttcaaggctcccttgggttccattatgggatatgctgacttgctttcccggctcaccgttgacggaaggcaacgcttctatctcgacaacatgaaaacttcttcggaacacctgctgaagctcgttaccgacttgctcgacttccatcgcctcgacttgaataaagctgagataaatcgtgttactttccatcccgcacgcttgctggaagaaatctatgtcagtttcgaaccactgacttctgccaaaggattgtctttgaagtgtgagatagatccggaactgaaaggagcttttatcagtgatccattgcgcttacgccagattgtcaataacctgctctctaatgcagtgaagtttacttcagagggcggcattaccctgaccgcctcttttgtgccgaaaggcgattccgtttttcccggtaaccatttgaaactctctgttatcgatacgggaaaggggatggatcttggtgaccgtgagcgtattttccaggaattcacccgtctgcccggagcacagggagaggagggattcggactgggactgtccattgttcgtatgctggtgcaactgctggagggacgtattgaggtggatagcgtgctcggaaaggggagcacattcacgttacgggtacctctgtatccggtgagagttggagaagttgagagtggagagttgagagttgagagttctgtgcagcatgatagcgcagccccctatagcgcagccaactctcaattctccactctccactctccacttatcaaccttctcttgattgatgatgaccgcattcagcttactctcactgccgctatgcttgcacagagtggtattacttccgtaacctgcctgcaactggatgaacttttggaagccctccgtactgatactttcgatgtgctgctgaccgatgtgcaaatgcctgccatgaatggtttcgatttgctgaggctgctgcgtgcttcgaatatcccgcaagccaagacaattccggtgattgccgttaccgcccgtagtgatatgaagcgtgaggagtttctgcaacatggttttgccggaagtctgcataagccgtttacggtgaatgaattgcttgcagagattggtgtgctgcaagcggatattgctactgttgatgccgccccttcttctaccttgaatttttccgcccttaccgctttttccggtgatgatccggatgcggcaaaatccatactggaaagtttcgtcacagaaacacgcctgaatgttgaccgcttgcgacaggcattggaaacagaagacacagatggcattgccgctatgggccataagatgcttcctttgtttactctgttgggagccaatgatcttgttactttattgaaagagcttgaagcctcacgtggagtaccttttgatgaaaaaataaaagagaaatcgcttgctgctctaaacctgatcgaagatatacttgaacaagccttcctttttatttcgtctgcttaaacatccctttcctctgcttggccggtagcttaaaatactgcctcagaaaaagtttatgtttatatacggttgttgccacttccattatctgatcccgtaatttcaggataggttccttatatctttccggtgcggtgcggatgctattgatcgcactatctgcccggtttatcaattcctcagggacatctaccatcgcctgaatttctgcatccggttttaggggctcaaatgccttattccggtaacggacgaattcattgatggcgtccgtagcttttccctgtaaatccattgccatattgtaagcattcagaatcttctggtagccggcgatgcggatgttgttactcgtaagttccagcatataataaaccaaatcattacttcgtccgttcgataacatgcgttgtctgacacttaccagcctttccagtgtatcctgccgtgcatatagcgccaatgtatccgcccaatagaacaccggtactgagcgttgttcatctacaactcctgtatcaaactcttcatagctcagtggacgttcgcggaactggaacatcggatcgaaaggcatgtgtgtgttcagtaatgtatccggtaacagcttgcagaaacgatgattcggggaaggaatgaactggtagttttccacaaatccagcgccccatgtagggtcaaacatataccatttcccacttactttggctgcgcaccattcatgtgggtcgggcagtaaggcaccgtccctgcggttatagccatcaataacataagcatccattcccgcttccttcaccagtgctttaaaaagtaacgcataatcctggcaaatacctttgcgttcggatagtattttttgtatttctttcgtctcatccgcttcctcgttgcgagaagtataggttatgtacacattgtatttaatatttcttgaaacccaggtgtagatggcgcgtgccagttggtcgtctgtgctgagatgctgtttcaagtaagctacaagagaagaaacgctccttccggcagtttcgggtgctgcaagtgccacggaatcgggaaacgtaaggcgttcaggcattatgctgtcagaagatgcttttgatacagctgaaattgaaaaagccttatcctgcgtggctgtattacgccatgcagaagacaatttgctgaaagggaagaggaggcagagggcgaatagccacaccgtgagcctgtttgttgattgccggaacatacttgtcatatctatttgatggaagcaaaggtaggggatttattgataaacagcaaggataaatattgaaaaatatgtgcaaagggaaattttgtgagtagtgtccctttcatgatcttgaacatgcccttgatcatgcctgaaaaccttcacccatatgtacggtatgacaccgtctgactgtcgttagtgggtacgtgagaaagtgaagtaattttcagacgggcgttgaatattggcaacgaccctcgcggtataaagtaccggatagtggaataaatagcctttttgtcttctgcatcaaccaaatgtcgttggaatttgtttactttgtaacgatttaaacactgactatcgattgacgtcctaatgagaagaaaatggttaaaatgggtagtgtggatactacttacccctatcatattatttgcaatattgatggtattgctttatatccctcccgtacagaacctgatacggaagcaagctactgccatcgcatccgaggcaacgggtatggatatatctgttgaacgcattgacctccgctttccgctgaaccttttggtacgtggtgtgcaggtcattcagcctatacaggcagataaacaaatattttcagctcccggtgactctcttgccgtgaaacaaactcctgatactttgctaaccctggaaagcctgaacgtgcgcgtgcaggcatggccgttgatacgtggacaagtagaagtggatgaggtaaccgtgaacggagttttcctgaactctgccgatctgatagaggggatccgcatacgtggcgtattgggacgtttcttccttgaaagccatggcatagacctgaagaaagaggatgccgtcatcaatcgtgtggaattgagtgatactcatatgctcgttgtgatgaatgatactaccactgccgaaccggacactgcgactaccgcccttaattggaaagtagccttgcacaagttggcactgaaaaacgtttccgttgatttgcaaatgccgttggattccatgcgtcttgctgcccgtctgggtgatgcagaggtagatgatgcggttgctgacttgggcggacagatgtacggtctgaagaaatttgaattgagcagtactacggtgaactatgacacgggcagccagttgctcagtgccattaatagcctgatagataccggtagtcttgcggctattgatagcaccggtgtgaaacctgctcccggatttgatgcttcgcacattgccttgcgggatattcgtattggggtggactccgtgctttatcatggacggaatatcaatgccgttatccgggaattctccatgaacgagcgttccggtttgagcgtcacttcactgacgggaagggtatatgctgattccacagtcattcaggtgccttccttaaaattacttaccccacacagtgaaatggatttcactgcccagacttattgggaactggtggaaattcccacctccggacgactctccgctcgtttcaatgcccgcatcggcaagcaggatgtgatgctctttgctggtgatttacctgatacattcaaggatgcatatcctttccgcccccttactatccgtgccggtacggaaggtaactttaagcagatgcagatttcccgcttcaacatcgatctgccaggtgcttttaccttgaatggtggtggtgaaatttggaatcttaccgacagtctgacgcgcaacggaagcattgacttcgatatccggacacaaaatctgaatttccttaccggactgacaggcgtcactccggatggctccatagtagtgccagacagtatgcatttggcagcatgtcttggcatggatggacctaagtatgatgctacgcttaagttgaaagaacgtgaagggctattgaacttgttggcgcactataacactgccactgaagcttatcaggcagaccttcatgtggacgccttgcaagtacaccacttcttacctaaagattctatctataccctttcggctaaggttgccgctaaaggaaaaggattcgatcctgccaaccaccgtaccgtggctgctgtacaagcttctctcggcgaattacaatacggacactggaatatttccggtattgacctgacagccggattgaaatccgctctagccactgtacacatgacgagcgacaatgccctgctgaaaatgcaggcggatgccgatatgcgccttgatcgtaaatacctggatggcaaggtggctatgaatgtggagaatgtcggtttacatgagttaggaatttctcccaagccgttgaagcatcctttcgctttcactctcggtgccgaagcacgccatgactctatcaagatgagcatggatgcaggcgacctcgacttccagttccgtgcccgcagcacactgaagaaattgctggaacaaggtactgccttttctacgcttcttaccaagcagatagaattgaagcaactcgatcatgcagaattacggaaagcactgccttcagccggtatgcaactgaaagccggtaaacagaaccctgtcagttatttcctggcaactaaggatatttcttttgatgattttgtgttgcgtttcggcactaccccccgacgaggtatcaatgggcgtactgctatacatggtttgcgtatggactccctgcaactggatactattttcttcgctatcagccaagatactgcacgcatgaagttgcagggtggtgtcattaatggtccaaagaacccgcagtttgtcttccgcagtacactgacgggtgaaatccgtaatgaagatgccgaactgaccttgaattatgtggatgcgaagggagataccggactcgatctgggtatcaatgcccgtcctttgatagagggccggggtaggggtaatggtattgccttccgtttgacacctgccgagcctattattgctttccagaagttccgctttgtagataacagcgactggatttacttgcataagaatatgcgcgtttatgccaatgtggatatggatagcgacgatggactttgcttccgcatgcagtccgaccgttccgacaccgtttccttgcagaatatcaatttggaactcatacgtttccgcttggataaactgagcggtattctgccatatatgccccgcatcacggggcttttctcggcagaagccaactatatacagaccgcaacctcactgcaagtttccgctgaggccggtgtggaaaagctgacttacgaacgccagccggtaggtaacatcggattgggtgccacttggcttccgggtgataaaggtacacactatctgaatgcctatttccggtcgggagatcaggaggtaatgaccgctgatgccgtcttgacccagaagaacgggcgcgattcggttgaagtcaacactacttttgagcatttcccactctcgcttgccaatgctttcatgcccgaccaggtagttgcctttaccggtgacatcgacggcggactctatatcagcggtgccatggagaagcctaagctgagtggtgacctctcactggacagcgtgtccgtctatgcccgtcaggcaggtgcacgttactggtttgacaatcgtccgttgaagatagagaataatcaacttatctttaataagtttgccatatacaccaccagccggaatccctttacgatagacgggaacgtagacttccgcaatatggaaaatccgacagcgaagttgaacctgcgtgcacagaactacactttgcttgatgctccccgtaccaaggaaagtatgatttacggcaaaatctttgtagatttaaatgctactgtacgtggtccgctggatggactgaccatgcgtggaaacatgaatctgctgggtaacacagatgtgacctatgtgttgactgactctcctctgactgtagaagaccgtttgggtgaacttgtcacgttcacttcctttacggatactacttcggtgcaggcaactgaggtccccaccatgtcgctcggcggtatggacatgttgatgtctgtgcacatcgatgatgccgtacgtttgcgtgctgatcttagccccgaccgcagtagtcgtgtggaactggaaggtggaggtgacctgaatctgcaatatactccgcaaggagatctcacattgtccggtcgctatacgttgataggtggtatgatgaaatatgccctgcccgttatcccgttgaaagagttccagtttgtcaatggaagttatgtggactggacgggtaatccgatgaacccttcactcaacctgactgctacggaacgtgtccgcgcttctgtatccgatggcgatgacggcggttcgcgcatggtgaacttcgacgtttccatcagcatcaagaaccgtttggagaaccctgatttgagttttaatctgagtgctcccgatgatgctaccgtacagggcgaactggcaggaatgagtgccgatgaacgaagcaagcaagccattaccatgcttgccacaggtatgtatctttataacagcggaaaaggtggtggcttaactatgggttccgcactgaacagcgtgctgcaaagtcagattaatgcgctgaccggaaatctgaagaacgcttctctcagtgtcggcattgaagaccgtaccgctgctgaaacgggtgataaacagacggactatagtttccgctactctcagcgtttcttcaatgatcgtatacagattgtaatcggtggaaaagtatccagtggcgctaatgcaacgaatgacgtggaatcattcatcgataatatttctttggaatatcgtttggacaatagcggtacacgctatgtccgcgtgttccacaacaaaaactatgaaagtgtgctcgatggtgagataaccgagacaggtgtcggccttgtgcttcgccgtaagatggaccgcctgagtgagctgttcatattcaagagaaagaagaaagtagaacctgtgagcgaatagtgtaaaagaaataacaatagcgcaatttaaagaatcaaaatgaagaaactcgtatacatcctccttgcaaccctgcttctggcagcctgctccactactaagcacctgcccgaaggcgaagtgctctacaccggtcagaagccgatgattgtagagaaccgctctgataccaaggtaggcgagactgctatggaagaagtggaagccgcccttgccaaagctcccaataactccctgctcggtagctccgaataccgcatcccttttccattcggactgtgggtgtataatggttttgcgaagtacaaaaaaggttttggtaagtggatattcaatcgctttgccgccactcccgtgctcatatcttccgttaatccggacatccggcagaaagtagcgacgaatatcctgcacgattatgggtacttcaatggcacggtaagttatcaaacttttgttaatcctaaggacagtctgaaagctaaattgcaatacacggtcgatatgcgtaacccgtacttcattgataccgtatattatcggggattcaatagtacgacgatgcagattatcaaccttggccgccggcgctccctgatcagtccgggtgaacagttcaatgttactgatcttgatggtgaacgtacccgcatcagcggtttgctgcgtaatatggggtattattattttcgccctgactacctgacttaccaggccgatacaactctcgttcccggtgggcacgtcagcctgcgcatgattcctgttcccggtatgccgaaggacgccgaacgccctttctttgtaggtaaaactaatttctacctccacggtccgcaaggacaaatgcccaatgacagtctttactacaagactttctggatacactattacgataaactgaagatacgtcccaatatgctccatcgttggttgaactaccaaggttaccaacggaaacgccaggaactggacaagggaggtatgcgccgtcgtccggaaaagctatatagccaataccggcaaacccgtatccaggagcgtctggcaagtgtgggcatcttccgttatctggagatgcagtacacaccccgcgatacggcactcgtttccgatacgctggatgtgaatatccgtgccatgttggataaaccgtatgatgccgaattggactttaatgtcaccatgaagagcaataaccagaccggtcccggtgccgccttcaccgtaacgaagaacaacgtcttcggtggtggtgaaacctggaatgtgaaagtgaacggttcttatgaatggcagacgggtaagaacagcagctcgctgatgaatagctacgagttgggcctatcttctgcacttaccttcccacgtatcgtcttcccccggatgggtaccaaggaatatgacttcccggcttccaccaccttccgtgtctacatagaccagatgaaccgtgccaagtactacaaactgcttgctttcggtggaaacgtcacgtatgactttcagcctgtgcctacccggaaacatagtatcacgcccttccaactgacatttaatgtgttgcgcaatccgactgcggcttttgaggaaatacaggctcagaacccggctctttacatcagtctccgtaatcagtttattcccaagatggaatatacctatacctatgataacgcttctcttcgcaatgtacgtaatcccatctggtggcagactacattcggatctgccggtaatctgacctctttgatttataaggcattcggacagtctttcagcaaggaagacaagaaattgctgggagtacctttcgcacaattcttgaagctgaattcggaattccgctatcactacaggatagacaagaaccagatgattgcttctcgtattgcaggaggagtaatctggtcctacggaaatgcaacgactgcgccttataccgaacagttctatattggtggcgccaacagtatccgtgcctattctgcccgcagtatcgggcccggtggctatccacccgataaagagaaaaagtattcctatatcaaccacgtgggcgatatccgtatggaagcaaacgtggaataccgcttccgtattctcggcgacctgcacggagctgtcttcctcgatgcaggtaatgtctggttgatgcgtaaggataaagaccgtcctgatggacagctgacgttgaagaatttcccgaaacaggttgctttgggcacaggtgccggtctgcgttacgacctggacttccttgtattccgttttgactggggagtggcactgcatgatccgtatgatacaggtaagaagggatattataatattccgaagtttaaagatggcatggcatggcattttgctatcggttatccgttctaatggcgggttttgtacgatagagctaaaatatgaaccaattgtctacctttcttgactttattttttgtaattttgccccgtaatcaaaacaaggatacactaacctttttaaataataactaagtatgaaaccaactttattcttattggcagccggaatgggcagccgttacggtggcttgaagcaattggacggactgggtccgaatggcgaaactattatggactattcaatttatgacgccattaacgccggatttggtaagctcgttttcgtaatccgtaaggattttgagaaagacttccgtgataaaattatttccaaatacgaaggtcatatcccgtgcgaattggtgttccagtctatcgacgatctgcccgaaggcttcacttgccccgaaggtcgtacgaagccctggggaaccaaccacgccgtaatgatgggtgctgatgtaattcaggaaccgtttgccgttatcaactgcgacgacttctatggtcgcgattctttccaggtaatgggtaaattcctttctgcactgcccgaagattcaaagaatgtatattcaatggtaggtttccgcattggtaatacactgagcgatagcggtactgtatctcgcggtctttgcggtacggatgccaacaatctgctgacttctgttgtagaacgcactaagattcaacgtatggacggagaagtgaaatacattgatgataatggcgaatggacggctactcccgaaactactccggtaagtatgaacttctggggctttactcccgattacttcgcatacagctgcgatttcttcaagagcttcttgagcgatccgaagaatatggagaatctgaagagtgaattcttcattccgttgatggtagataaattgattcaggacggtgtcgctacatgcgaggtccttgatactacaagcaaatggtttggcgtgacttatcctgaggatcgtcaaagtgttgtagataaaatccaggctttagtggatgcgggtgaatatcctgccaagctattttaagtctggagaactttgcgaaagcaaatttaaaattaggaatgaaagggagtcatcgtgagatggttccctttcttaatttcatggcaatgcgtctttctgaccgaagatagagaccggacggctgaagcatatagtcttatcacctgtttgatgctttgatatgatccggttcattatgaggggtgatgcaaaaggtggcatcttttgctgttaaagatgccatcttttgttgtattagatgccacctttcgctacaaaagatgccatcttttacatgaggggtataaatgatgaaggcgagatgaatgcaagatggatgtttaaagttgtatagttgcttcgcaagcctcggctactgccggatggtgtgtgatgaagatgaatgttttgcctgtgcagtctctgcgcaggttttttattagttgccgttccgtttcgggatcaagggcggaagtagcttcgtccagcagcaggatgtgtccgggacggaggagggcgcgggcgatggcgatacgctgggcttgtccttcgctgaggccgccaccttgttcgttgaggttggtatctattccgtccggtaaagagagaacgaagtcagcacaggcggtacggagagcctggagcatttgggcttcggtagcatgagggttacccattagcaggttgtcgtgaatggtaccgctgaaaagagtgtttccctgggggacatagacgaagttggaacgggtttgaggggaaacttcgagagttgagagttgaaagttgagagttgagagtgggggctgcgctgtgtttgcaggcgaaagggtgatgcttccttcttgcggagtggcgagtgcgagaagcaaccggatcagggtagtttttccggcaccggtttcacccaatacggcagtgcagcttccggcggggaagttgcaggagaagtgatttaatataggtcggtctcctgttgaataactgaatgtgacatccttcaattgtaagtccggggtttgggggaacagttgtgcggttccacttgcttcggagggaagttcttccagttccatcagtcgctctacggcggtgagggcattgataaaggaaggcagcaggcgtgaaagatcgagggcaggtcgttgcacttttcctaccagttgcaggaaggcggtcattgttccgaaagtgatactgcctgtgctaaggcgtattgctccccaaagaaatgctgtaagatagccgccggaaaacgcaaatgccaccagcatacgtgcagagagcgaaaagcgggtacgaccgaatatctgactacggagtgcatcttgcagatcatccagttttccgatatgccggtcgctttgttccagggttttgatgacggttcggtgttgcaggctttcttgtataacggattggatacggctgtcgctctgccggatttcacgggtgtagcggcgcattcgtttcatatagaagcggctacccaataggaaaataggtagaatgcctaccactacccaaggcagggacggatcgagaaagcagaagaatacgaatgcggctaccaactgaacgatggtaactatgaaagccggaattgtactggtcagtacccccacgatagcggcggtatcttgttccacccggtttacgatatcgccggtgtggaagcgttccaattcgttccaacggctttgtaatagacgggagaataggcggtggcgcagtgcgtttccagtttccacttgcatacgggcactgagccaggtgtcgacggctccgcacagaagttgggcgattaacaaagcgatagtaaggatagcggcattggtcaggcttccgatggcggcacctgtggcaatgtcgatgacgaccttggaagcataaataaaagcaagagaaaccgctaccccaatgatacctgtgaggcaggagaggagaatacgttcccgttgtccgtgagatacttcccagatgtactttatttgttctgtcttcataatgagttagttacgagctgcgagcttgttaatttgtattgttactgttccctttatcagcgtcaccggataccataacgcctcattgggagcaaactttcgcagcttcatgcagcgtttggttgcccggcagaaagtgtgccatttcccggcccaataacctttgggacgtggcttgatgcgtgcgtcatgctgaccgaagtttccggtagcaaagatatcatccagtaagatttctcctgcccgttccatacctttgacggagaagggcaggttgtcttccggcaaacccagataatgcacggcgatatatccgaaagcttttgcggcacgtagcaatcctactttacggaaatacttttccagcaaaagtttgtcaatatcttcatgacgtgttgccaacagacgggtccagtcgcaaacttggcgaaggccgatgccgctgttcaggaaatggacgaatgcatgcatgaagatatacagcgcattgaatgttacaggcgggaggctgacgggatattcgtgtatctctcttgtttcagcatgctgtgggtaccattcctgtatcagacgttggaagtaccggttacctgccggattgttaatccgcaggatgatacgatggttttctatatgaacgccatgaaatgaatagctggcgtgtttgtccgatgcttctccttctgcctctgcaccgtgacggaacaaaatattgttggctatgggctgtccttcctttccgatatagacgtcgatgtcgccacattgacggtgcaatgggtttatgtagtgagtggcgatgccttgtcctttcagtagaatagggtgtagaccggcttcccggtatggcataaaaacttccgggagttcttcattcaggcggaggttagactgctcgatttgtactactttagctgcccattgcaggtagagcggtcggggtgggcgcagttctgccggcagactgagcactccgtcgaaggtaatggcgagaagggcttgggtacgtgccagttggtatatttcttcccagtcggcactgttcatgctactgaacggggttgggtcgacgggggtgttccataatccggaacgtaccaaggttaggaaagtacgacgcatatgctattctatgattccggcttccaaccagttctttatcagttgttctgcatcccgctttgcggtttcagcgtctacttcgtagttttccgtaaggaaatcggtaagggtgtcggtattgaaatctgttccttctacatgttgccaaaggcgggttgccgtagggttcaggctgatgatattgctgaaatctacgtttcctgtaccgttgtgcatgatgatgtgttcgtcaccaatctgatgtaaagtaaatccgttcttaattttcattgtttgtatgtattaggggttgttattgtgataatttctcatctgcaaatgaagcggatgacactgattttttgttacgcagtatttaatcctgcgttattcgcgtcatctgcggatgaaaaatctttcttcttctgaatattgccaatagccatcgccttacaggggtcagtttcatccaccaaaaagagtagcgctgccagacacggtcattacacggatattctttctctttacggatggcggcaatcattactcccatgacgttggctatgttggtctgttcggttattcgtatattaccgtctcccagtaatgttagctcttggccgttgcggtggatgatgcggtggaagataatatgtccgttcgtatctctggcaagtacggcaacgcccggttgtaaatcatcatcggtaaaagggcctaaaataatacggtcgcgacggtctacaagaaacgggttcatactatttcctctgaccgtcagggttacggtatgtccttcgctgatgaggcgtgctacttcgggtaacagtacctcgttggggataattctttttcgtccgttatctatcattctttttcggttatgagttgtaagcattcggccttgtacgtgtcagtctttcttgtttatcccttccaattaaatggcagtaaatcggagtagtcgtttttctcttctctttctttatcctgtactctaatcaacacgtcctgcatccatagtttcgggttcaccttattttccctgcaacatcccatcagtgaaaagaatattgccgctgcgtgtgcggcttcatgcgcccctgagaagagtacattctttctgttcagcgtcaggggccttatggatcgttccacgggattgttgtctatacagaaccgtgcgtcattcacgtatcccgatagctgttcaaatcgtgtgtacatatagaatatggccttggcaacaggcgatttatcgactgtatgttcatattcctccttgcaccatttttccagtcctttaataataggataggatgtttcccggcgaagctttactacagcctccccttccagatgttctaccctgattttctcctccacagcatacagtctgcctatttgttcaagtgcatgccttgctctgggagggtcattcccttccgcttccacaaacttgcgcctgacatgtgcccaacagcacaggtgcaactttccgggtagcgtgtcgaactcgtcatatactgcaaagccgtcgctctgtaccacccggacctgtcctgccagcagtgtgtctattccgctgctgccacgtcccttgtgatattcaaagaagggggtatggaaccggggcagatagaagttccacatatacccgcgatgaagggcaccggggcggtcgctttcaagtacgggatggggcgtctcatcggccatgacgtaataactgtccttaaccagttcacgaagctcattatagatcggctccagacgttgtgcggcagccatcatccagttacttacggtggaaggactcagatggatgccttcacgctcaaaaatgtccaactgcctgtgcagaggcaggtgatcgtaatatttggcggtagcaatgtgggacagtacactctccgacgcattgctgtgaggatgtgccattacgggcatgggagctgttatgatacgaccgtcggcaagccggtatttagggcggatgatacgtctcacatagaatcgggcagggctgacggcatattgttcgctcacttcatcccccagcttcgtcgctccctccagcgaaagaccttccggcatgggaatgatgatttcttcacggggaagggacgggtcgatgggcttacgggcgtggggagtaatctttttggtgaagctcttacggaaacggttgtaaccagtctccgattgggcagatttttcagccgttttccgctcctccgctaccgggtcattgacatcggacggagattcaaaacagatgctcaattggttggcgtcttcgggaagatgacgtttttcactggatttaccccataaacggcgtgtcaagtcagccaatttccatctcaggtcggcaatgacagcggtgcaggctgagatttcctcgacttggcgggaatactcctgcaaagaggcttcgtattttctcagaagttccgcatgttccttttcaagacattcacgttccttgcgcaactcttcgtactcttccaaggtaagggtaatgactggttctttcactgtatatccacttttttattatgcggcaaagttatcaaaataaagctgtacggattgtaggatgggagattacttttcaactgttttccgatactttttaacagtaagcagctcattcaggcgattccaggaaatttgaagaaaatctcttttccgttcgtcctttttcaagaggaaagaactgtggttcagacggcggcattccagacggtattcgtcctcgcaccgataaaggatatgcaatctgctacgggaacggtcaagaaaaatatggcaactctgccctgacacgcaagaacccgtatgccggatgacctcgccacaaagaccgtcaatacctttatggaaattacaaccatttggataaaggtaataagaccagaaaggactgctacggaaaagaccaagacctaaagggagaagtagatcctgaggagaatggatgccaagactggaagccgaaactttataacgacgaccaccatcaaatatgaaaagaacagaatcaaaatgattagactcggaaaagagactacgcagtttctcactttcactagaaaatactaagactgaacacataatggattaagatgattatgaagacacaaaggtaggaaggaaaagaagggaaagaaacacgcacaaggccgaatgcttactatgagttaaatgataaataatcttttagacgcggatgacacggatgacgcggatttttttttatccacttttatagcgcagctttttaaatccgcgttatccgcgtctaaaaaataatataccgaatggcactaatcacttatcactaaacattaatcacttttgttcttttccatatcgtattaaaacaaatctccgccgcctccctgtccggcaagcatttcagaaaatacaccggagtatgggccgcaagatatttcactgtctcgatgacaccattattcaattctctcacttccttcagattagagcacgatggcaatagtgatgcgaaggcccgtgccggactctctcgttgaatctcattcatcggagcctgttccaatcgtacaaatgcccctacaggaacagagtcattcttgtagcagggtgtctttccgctccagggagaaccgtagactgtggcttcccctgtttcctggttgaaatgcacgatgggattatcatcgttcagcagttcacagccggggatatgattcagccacaacccgctgtgcgtactttttcccgttccgcttttgccttggaagagatatccttttccatctttctttatgacggaagcgtgcattaatacagtatcggaacaagccgtattgaaagcataaatcatcatcaggatattgttgagcacaaatgcatccgcttctgttgcgtgcaggaaaaggacacctttggtaaatccgtagaggaaataagctgtgtactcttttggatcgttgggagcgaggatggtaatgagataagagtccgtatccgggatcacactgatcctgcacgtggcaccttcccattcgaactcgatgagtgagcgatattttgcatggtcttcttcttgggtttcactctccggctggatggcaagtgaaaatgctattttgagttctttctctttgtatgtatctaaagataacaggaaaggtttcagggaaggaattaactcttccgttttccagtgtggaatggtggaggaagtaccgaatagatgaggccctacttgatatacctgtgcgttacgctctcctttcataatctataatatttgatgtaccggtgtaaaggtagaggaattcttctgattggacaactgaattttacacaatattacaggtttcggttcatttctccagtcttttccgtttcggtatgttccggggatgctatatctttgtaggcaatgaaatcattaatcttgaataaaccatgaaaactgtacttatctggttggctttgtgtttcggcaccctaatgaccacttatgccaatggaacggcttaccttttttcctatttcatcaatgacagcagagacggattgcatctggcttatagttatgatggtctgaactggactgccctgaatggtggcaagtcttacctgacccctgccgtggggaaagataaactgatgcgtgatccgagtatctgccaggcacccgatggcacctttcatatggtctggacttccagttggaccgaccggattattggctatgcctcttcccgcgacctgattcattggagcgagcagcgagccatccccgtcatgatgcacgaaccgactgcccacaattgctgggcgcccgaacttttctacgatgagccgtcgcagacatattatatcttctgggcaaccaccattcccggccgtcataaagaagtggcaaccagtgagagtgagaaagggttgaaccatcgcatgtactacgtaaccacgaaagatttccagaccttttcgaagaccaagatgtttttcaatcccgatttcagcgtcattgatgctgccatcgtgaaagacccgaagaacgaggagctgattatggtggtgaagaatgaaaactccaatcctccggagaagaatctccgcattacccgtaccagaaatctggcgaaaggattccctactaaagtttccccttctatcactggaaactactgggctgaaggacctgcccccttgtttgtaggtgatacgctctatgtttatttcgataaataccgcgaccaccgttacggcgcagtccgttcactggatcatggcgagacttgggaagatgtgtccgatctggtttcattccctcgtggcatccgtcacgggacggcttttgctgtggatacctccgttgtggaagctttgatagcaaaccgcaattataatcctctgattcccgataatctggctgacccttcactttctaagtttggcgatacctactacctctatgctactactgacctggactatggtctcggtcgtgccggaacgccggtagtgtggaagtcgaaagattttgtgaactggagctttgaaggctcgcacatccagggcttcgactgggcgaaaggctacgattgggtgaatgacaaaggggagaagaaaactggttatttccgttattgggctcccggaaaggtgattgagcagaacggtacttactacctctacgtcacctttgtgaaaccggatgaaaagatgggtacgtatgtcatgatagctgatcgtccggacggtcctttccgttttgctgaaggtaacgggctttttgctccggaaacggaaggtgcggatagtccgtttatcgtaaatgacattgacggagaaccttttattgatgacgatggcaacggttacctcttctggcgccgtcggctggctgcccgcctttctgcggacaggcttcatatagaaggtgagccgctgactatgcagactgcccgtcagggatattccgagggcccattgatgtttaagcggaaaggtatctattattatgtatatacgttgagtggaaatcagaactatgtcaatgcttatatgatgagccgtgaatctccgcttagtggtttcgtcaagccggaaggtaatgatatcttccttttctccgctcccgaaaaccaggtttggggacccggtcacgggaatatcttctatgacgaaaagacggatgaatatatctttctctatttggaatatggcgacggtggaactacccgccaggtatacgccaaccggatggaatttaatgaagatggaaccatcaagaccttagtgcccgatatgcgtggcgtaggctatctgtccgcgcctcaggagacacgccggaacttggcgttgcaggctgacttccgggcttccagtgagaaagctccccgtacggcggtggtagacatcgagacacaaccgaatgatcctctgccggagaaagcctcggtgaagaaatatacccgcacacatacttatcaggctgcccacgttggcgatgaatcgaacggaacccgctggatggctgccgtcacggatagcagcccgtacattacggtggatttgaaagagatgcgcaacgttggcgaatgccagttctatttcaccaagcccacagaagggcatacatggagactggaaaagtctgtcgatggcaagcattggcaggtgtgtgccgaagaaaagaaacttcaggcacggtctccccatgtggctaagggtattggcgaggcacgttatctccgcttacatattctgcggggagatgcggggttgtgggaatggaaaatatatgaataggtgatccggattaagatttcggtcagaaccgttcaatccagttttctattgtgataggggaaaggtggttgagatgcttcacgttttcagtcaccattacaaagccgccgtgtatggcggtcgcccctatcagaatatcaaaatcatcaattagttctcctcgtgcacacagtgccgccttttggtcggcaaaaatgggcagagcatcgtaaatgggcattactttgaactgtgaaataaactctgctgtttgcttcaagtgtttctctttattaccgctgcgcgaaactccataaagtaattcggcgacagtaatctctgagatataacagttcttctgtcccactttttttatcttctcatccaattggtatctgcctttcatgtaaaaaatgcagatattggtatcaagcaagtactttttcattcgtcaaaggatactattttgcgagtgcggttgctcgttctttccttgcggatgttttcttccatatggtctgtttcgggatcatcggcccatacaccaaaaagatcttccaactttccgttgccggttctgttcttagcttctttctttaatatggagtcggtgagcatctttatcagatgtagtttggcttcatcgctcagtgacttcagcatatcgaagtagctacttgccagtttaaggctcatgtccataactcatctcctttcttgttgatttatagtggcaaagataaggtttgcctgtggcttctgcaacaaattacgggaaaaatatgtttcctccgtcacctttccgaaatctctaatatttataagttaacataatgcgcccttccgaagtattggaaaatacattggcgtgatacctgtatttggtatcgcgggtgtagttcataaatgtgccggtgaggtacagttgcttccgcaatttcaagtccagccgaaggccaactgcatggaggatggccctcgaacggtctccttgagcattgagcgtcttcggttccacttcgtcccagttgatgtcttggggataccctttccaggtgaacatgtggtagacttcgtagatggtggatatggcaagacggtccttgtaggtaaagttaaagttgagcttgctgctgtagccgctggccaggttgtagatgcgttcgtccacttgataatagtcgctgagggcacctcccagaaggatggcgttgaggtaggcgtaaccatctattccccagtttcgtttgaggtttcttttgtagatgaggccaccgcccacggaagcgggtgtacagaatttataaggtacttttgccgatactgccgatatcgtgtccgaatcgtagtagtcgaagtgctggtacagcccaaggctgaggtagtgcttttcattgttcaccaactctttggctaccagtcggccaacaatgtttatctgtcccagaaccggttgatctttctgccagttcaggtttgcctggatggagaaatagtcgtagggtttggtatcttccgcatcgaagcggtcgccgtattcgacgttgatttcggaggccagacccacacctttgtccagaatctcgtcttttagttccagagtacgtatacccaatgacacatccacgcttacatcgggcacaccgaattgcttacccgaagtggaacgccgcttccaggcatctccgttgataatacgggtcaagccgcgcataggagacaccaggaatccggcaaactccagtccgaagcgtgaccaaccggttttccggtcgtcgaggatgaggtcggaaaccctgtaagtcacttcacccagggccataccaccgataggggtggcaatgatgtcgttggtagaggggtactcgttttccataaacatctcccacatgaagctgccgccgaaggcgaagaggccggactgccagaaactatatccgttggaccgggcagagttgaagtacaggctaccgtggtaggggtgcatgaacatattggtacccatggcgtcattgtcccacacgaaaccatgcttgaggttatccttgatagtacgcccgttgatgtaggcaaagtcggccttgcggatgtagcggtcgaaggcccagacgcccatgttgataccgaagaccatggtgcccgcctgaaaccctcttttccgggagtaatagtctatatcgagcgagtcggcaggtcggggagtggctaaccggtggcgaatggcgagttgcggataagccacatcaatggctatcaggaaggtgagcagagtcagcagtaactttttcatgacgcaaacatagggatttttataaaatgcacgtagttgtatttttcgtaaaaagtctctagtacttcttaatttaactcgtttgcagcataaaaggttcgcgaaagggacacttttctataacctcactctcttaccgaattccgaaacatctgcggcgttacccccgcatgtctcttaaagaacttattgaagaaagcggcattattgaaccccaaattcagcgcaatatccttcaccggcgtattctccgtgcgcagttgcgtcttggcatccatgatgagcgtcctgttgataatctccattgccgtatgtcccgactccttcttgacaagccggcaaagggcggacggttgcatattcatcttcttggcataatacaccacttggtgctcacgggcatattcctcatgtaccattcggacaaaaatccggtactgatggaaatgtctgctgcctggcgtctctttcagtttcgcctgttccggacaaagttcggataccccctgcaacatcagacttaggaacgactgcaacacagcctcactcaacttctcctcaacctctttataaagatgcgacagaaacgtaaacatctccgagtaaagttgcgaaaccatttctgacaacgagaaaacataatgcttgccgatgatatgaaacttatccatcatattcttgcccattccggcatgctgtatcagttgctgagaaaacatgacagcatgtatttccacatcatccgatgcggtcagtagctggacgaaagtctcgggaggagcaactatcagttcattcactccaatccgatattcggtatgattaataattgtcttcagcgaacccttgctacaaagggcgaaaatgcctccctccgtcttataagcccgccccgacagatgactcagcccacttgccgtgatctgctgatatgcaatgaagtcggcatttatattgaatttagttatactcatgtcttatcttttaagcatgcaaaattgaatgatattgatctataatcagcaagaataaccgttaaatccgactctccgtccctttttatccggttaaaagatgtaaaggtgtgaacgatggaatatattcgcgtccaaatggaatattgatttcttccggtttgtttgccatctatccgtttaagcccgacctttgcggcttacacgataaacatagctttatgaacaccgatatgtctcaggaagtacggatagtgaacaccattgctgaacaattgttcgatgtatggcccgtcagcattgtcatgatcgaccttgaagattgcgtctggcgcgtgaacaaacaggtgagtgacgaactccagttggatgtggatatcattggaaaatccgtcgtcgatgtgctggaaatagtgcaggacaaggaggatgtcctgcactgttatcttcaggatttgcatgaggattcccggcgattcatccctttgtcttccaattgtttcatatgcgaaccgaaaagacatatcactttcctgatacaaggtgccctgataggcgtgtatgaagaagacagactggtcagaatcgtactctactatcgcaacgtggtggaagagagtactcaaaagcatctgttggatattgctttgagtcgtacgcagatattccaatggtcgtacgacttggagcacaactgcatgatcatcgattcccgttacttcgaatacctgaatattcccactcgtgactacacacttactaccgaagaatttctctatctggtacatcccgatgaccgtcaggcggtgatatatgccttgacctcgcagttggagggtaacttgtatgaagcctccgtgcaataccgcctccgtcgtgacgacggcagttgggagtggttcgaagcccagtccacctacgtagggcagttgaaagatacccctttccgcatcattggcatctgcatgagcactcagaaatataaggataccgaagaacggctgaacgaggccctgcataaagcccggtgcagtgacgaactgaaaagtgtcttccttgccaatatgagccacgaaatacgtacgccgctcaatgccatcgtaggattttcttccctgctggcctatggcgaatctgatttgacaaaggaagacatcaccgagttcacctccctgatcgagaagaacagtcaactgctgatggtcctcatctccgacatcctggacctctccaagatagagtcgaataccatggagttcaacttctgcaacatctccctccaccaggtattgaatgagataggcagtgcgcaaagaatgaatatgcagaaaggtgtggagctactgctggatctccccgaacaggcgattgccatttataccgatcccacccgcctgaaccaagttatcaacaatctggtgaacaatgcgataaagttcacctccgaaggaaatatccgtataggctaccggcctgccgcctccagtcgtgtaaaaatatttgtggaagataccggaacaggcatggctaaagaagtaattgaacatatctttgaccgtttttacaaaggagacgccttcaagcaaggcacaggactaggacttgctatctgccggacaatcgtcgaacgcttcaaagggaagatcgaagtagcgtctacacccggaaagggtacacgctttacaatcatcctgccgctgaaagtagaagaatgagttggtgcataacgggatggaaagggataaaagtgattagggtttagtgataagtgataagcgccattcggtatatgatttcagtggattctttgtactggagacacaacaaatgatgtgggaactgtatgccgaatggtgcttatcacttatcactaaaccctaatcactttgttcataaccctacataaatgaatgaattccgccaacgagttacaataatataggcttacgatgtcatatcccgctggaaatcgttacctttgcagccctgaacgataaattcattgacactatgatatcagtagaaggactgaaggtagaatttaatgcaacccctctgttcgaagacgtctcttacgtaatcaacaaaaaagaccgcatcgccttggtgggcaagaatggtgcgggtaagtctaccatgctcaagatattggccggactacagcagcccacttccggcgtcgttgccattccccgagaatgtactatcggttacctgccgcaggtgatgattctcagtgataagcgtaccgtgatgcaagaggcggaactggctttcgaacacatcttcgaaatgcaagcagacatcgaacgcatgaaccagcaacttgccgaacgcactgattatgacagcgaagaataccataaactcatcgaccgtttcactcatgagaacgaacgtttcttgatgatgggtggcaccaacttccgtgctgaaatagaacgaaccctgcaaggtttaggtttcagccgcgaagacttcgaccgctccaccagtgagttctccggtggttggcgtatgcgtatcgagcttgccaaactcctgcttcgccgtcccgatgtgctgttgctcgacgaacctaccaaccacttggatattgagagtatccaatggcttgagaacttcctttccacacgtgccaatgccgtggtattggtgagtcacgaccgtgcatttctcaataacgtcaccacgcgcaccatcgaaatcacttgcggacagatttacgactacaaagtgaagtatgacgaatttgtcgttctgcggaaggaacgtcgtgaacagcaactccgtgcctatgagaatcagcagaaacagatagaagatacggaagcctttatcgagcgcttccgctataaagccacgaaagccgtgcaggtgcagagccgcatcaaacaactggaaaagatagaacgcatcgaggtagacgaggaagacaactctgcattgcgcctgaagtttgcttgcagcagccgtagcggaagttaccctgtcatctgtgaggatgtccggaaggcctatggcgaccatgtcatcttccacgatgtcaacctgaccataaaccgtggtgagaaagtggcgttcgtaggtaagaacggtgaaggtaaatccaccctggtaaagtgtatcatgggagaaatcaccgactataccggtaagctcaccctcggtcataatgtacagatcggttacttcgcccagaaccaggcacaactcctggatgaaagcctgacagtattcgataccatcgaccgcgtagccgtaggcgatatccgcacgaagatacgtgatatcctcggtgccttcatgttcggaggtgaagcttctgataagaaggtgaaagtgttatccggtggagagcgtacccgtctcgcaatgatcaaacttctactggaacccgtgaacttcctgatactggacgaaccgaccaaccacctcgatatgcgttcgaaggatgtactgaaagatgccattcgcgaatttgacggtacagtcattttagtaagccacgaccgtgatttcctggacggacttgcgactaaagtatatgagttcggtggtggaattgtaaaagaacacctcggtggcatctacgacttcctgcaaaagaagcagatagaaagcctgaacgaattgcagaaagcacccgcactttctacctcaccttccggtggaaaagagaatacggataccgccactcagtcttccggcgccaagctttcctatgaagaacagaaggaactgaacaagaagctcaaaaaactggaacgtcgcgttgccgactgtgaatcggagatagagcagaccgagtctgctatcgccatcctcgaagcccggatggcaactcccgagggagcttcggatatggccctttacgagcagcatcagaaattgaagcaacaacttgactctgtgatggaagagtgggatgccgtctctaccgaactggaagaagccaagcgagaacaataaaacgatacggtgaataccttccccttatcactttataacattattttatatcttatgaaagtaactcattatttacctttagctgcagcttgccttatgatggtgggatgtggtacgggcaagcagaaagctgaaatgacagccggtattcagcttgccaatcttgacacaactgcccttccggggagtagtttctatcagtacgcctgtggcggttggattgaaagccatccactttcacctgagtattcacagtacggttcttttacagaacttgccgagaataatcgtaagcagatacaaggcctgattgaagaactggctgccactcagcacgaagctggtagtgtagcgcaaaaggtaggcgacctctacaagattgttatggacagtgtgaagctgaacaaggaaggtgttgctcctatcaaagccgacttggaacagattgcttccctgaaagataaagaagctgtttatgctttgctcgccgatctgcgcaaacagggtatcggtgcttacctcggcctctatgtagctgccgacgaaatgaacagtaacgagaacgccgtgcagctttatcaaagcggcttgagtatgggcgaacgcgattactatctggctaccgatccttctactaccgctatccgtgatgccttccgtactcatgtacagaaaatgtatcagttggccggcttcgatgaggctactgccaagaagggtatggaagtggttatggacgtggaaacacgccttgccaaagctttccgttcccgtaccgaactgcgtgacccgcatgccaactacaataagatgagcatggaagaggtgaagaagaattatcctacttttaactgggatgcttacctttcaggccttggcctgacagatgtgaaggaaatcattgtcggtcaacctgcttcggttgctgaagctgccaacatcctgaataccttacccgtcgatcagcaagctctttatctgcaatggaaattgattgattctgctgccggttatttgaatgatgagatggctcaacagaatttcgacttctacgaacgtaccatgtctggaacgcaggaaatgcaaccccgttggaagactgccgtttctgtggtaagttccgcactgggtgaagccgtaggacagatgtatgtagagaaatacttccctgctgctgccaaggaacgtatgatatctttggtgaagaaccttcagaccagcttgggcgaacgcatcaacaaccttgcctggatgagcgacgaaaccaagaagaaagcacaggagaagctggccactttccacgtgaagatcggttaccctgataaatggaaagactactctacgttggagatcaaagacgattcatattggaacaacatcaaacgtgccaatctttggggatatgccgaaatggttgccaaagccggcaaaccggtggataaagacgagtggttgatgactccgcaaaccgtaaacgcttattacaacccgacaacgaacgaaatctgttttcctgccggtatcctgcaatacccattctttgatatgaatgctgacgatgccttcaattatggtgcaatcggtgttgtaatcggtcatgagatgacacacggcttcgacgaccaaggtcgccagtacgacaaagacggtaatctgaaagactggtggacggaagaagatgctaagaacttcgagaaacgtgccgatgtaatggttgctttctttgacagcatcgaagttgcaccgggggtacatgccaacggtcgcatgacactgggtgagaatattgccgaccacggaggtttgcaagtatcttatcaggcattcaagaaggctaccgctgccgctccgctggaagtaaaagacggtttcactcccgaacaacgcttcttcctggcttatgccaatgtttgggccaacaatacccgtcccgaagccatcctgcaattgacgaagatcgatgtacactctttgggcaaatggcgtgtagacgctgcattgccacatattgccgcatggtatgaggcattcggcattacagaaaaagatccgatgtacgtaccggtggcagaacgcgtctctatctggtaagtcttgccatcgctttggcacagttgtgccataggcatggcataatcttgccaaggtgatggcaaaactgtgccaaggctgtggcacaactctggcacagtggggcggtatcctctccgtttagcaaaaaagaaagataaaggcagtaaatcctaaacaggattgctgccttttttaattatacctaatttattgtgtttgagtatgtgtgcaaataaacatttttagtacctttgcgcatcaaatacttatatacgcaattccatgtctgaaacaaaaagaattaaaaccgctttagtatcggtttatcataaggaaggtttggacgaaatcatcaccaaactgcatgaagaaggagttgagtttctgtcaacaggcggaactcgtcagtttatagaatcactgggttatccctgtaaagcagtggaagacttgactacgtatccctctatcttgggtggacgtgtgaagaccctgcatccgaaagtgttcggtggtattctctgccgtcgcggactggaacaggatatgcaacagatagaaaaatatgaaattcccgaaatagacctcgttatcgttgatttgtatccgtttgaagctaccgtagcttccggtgccgacgagccgactattatcgagaaaatagatataggcggtatctcactgatccgtgcagctgccaagaattacaatgatgtggttatcatcgcttctcaggcacaataccagccgttccgcgatatgctgatggaacatggagctaccacttcgctggaagaacgccgttggtttgccaaagaggcgttttccgtttcttcccattacgattcagccatcttcaactacttcgatggcgaagaaggttctgcattccgttgctctgccaataatcagaagactttgcgctacggcgagaacccgcaccagaagggttacttttacggaaatctggaagctatgttcgaccagattcacggaaaggaaatctcttacaacaatctgctcgatatcaatgcagccgtcgacttgatcaatgaatttgaagagactacgtttgccgtattgaagcataacaatgcttgcggtctggcttcacgccccacggtgctcgaagcatggaacgatgcattggccggtgacccggtttccgctttcggtggtgtgctcatcacaaacggagtgatcgataaggacgctgctgaggaaatcaataaaatcttctttgaagtaattatcgcccctgattacgatgtagacgcattggaaatcctgggacagaagaaaaaccgtattattctggttcgcaagcctgccacactgcctaagaagcagttccgttctctcttgaatggtgtgttggtacaggaccgcgacctgaacatcgagaagcctgaagatttgaaaactgcaaccacgaaagcacctaccgcacaggaaatagaagacatgctctttgctaacaagattgtgaagaacagcaagtccaacgctatcgtactggctaaaggcaagcaattgctggcaagcggtgtgggacagacttcacgtgtggatgctttgaagcaggctatcgaaaaagccaagaacttcggcttcgacctgaaaggtgccgtgatggcatccgacgctttcttccccttccccgactgtgtggagattgccggaaatgaaggtgtgaccgcagttattcaaccgggtggttccatcaaggatcagctttcgttcgactattgcaacgaacatggcatcgcgatggtgaccacaggaattcgtcatttcaaacactaatattaatgatgaattatgaattatgaatgatgagttagctgcgccgagcatgctgtcatcttcataattcataatttataattcataattaacaacatgggattattctcttttacgcaagaaatagcgatggaccttggtaccgccaataccattatcacaaccaatggtaagattgtggtggatgagccttcggtggtagctctcgaccgtcgcaccgataagatgattgccgtgggtgataaggcaaagatgatgcacgaaaagacccacgaaaacatacgtaccatccgtccgcttcgcgacggtgtaattgccgacttctatgcttgcgagcagatgatacgcggtttgataaagatggtgaataatcgcaaccgtctgttctctccttcgctccgtatggttatcggtgtcccctcaggtagtactgaagtggagctgcgtgccgtgcgtgactctgccgaacatgccggcggacgtgacgtctacctgatttttgaacccatggctgccgctatcggtattggtatcgatgtagaagctccggaaggaaacatgattgtagatataggtggtggttctacggaaattgccgttatctccttgggtggtatcgtagccaacaactctatccgcattgcgggcgatgacttgactgctgatattcaggagtatatgagccgtcaacacaatgtgaaggtcagcgagcgtatggccgagcgtattaaaatcaatgtaggtgctgccttgactgaactgggtgaggatgctccggaagattatatcgttcatggtccgaaccgtatcacggctctgcctatggaagtgcctgtatgctaccaggaagtagcgcactgtctggagaaatcaatttcaaagattgaaacagctatcttgaatgcattggaaaatacacctcccgaattgtatgccgatatcgtgcacaatggtatttatctggcaggtggtggtgcattgctccgtggactcgataagcgtttgactgataagataaacattccgttccacattgccgaagatcccctgcatgctgttgccaaaggtacgggtgtggcgctgaagaatgtggatcgtttctcattcttgatgcggtaataaaggcatatgcgaaatttactgaactttcttattaaatacaactactggttcctctttctactgttagaggcagccagttttgttttattgttccgcttcaattactatcagcagagtgtgtttttcacatcggccaatagtgtggcggggaaagtttacgatgtttcgggaactataacttcttatttccatctgaaatctgtcaatgaggacttgctcgaccgtaatatgtggctggagcaacgagtggcattcctggagaaaacattgaataataaaggaatggactctgtccggctctatagtctggaacggcttgaaccggaagaataccagatattcaaggcgaatgtcatcaaaaacagtttgaaccgggtggataactatattacacttgatgaaggttcgtctgcaggtatccgtccggaaatgggcgtggtagatgctaatggagtagtgggcattgtctataaaacttctccacattactctaccgttattccgttgctgaacagtaaatcgagcatcagttgtaagattgtaggcagcgagtattttggttatttgaagtgggaatatggagattctcgctttgcatatctgaaggatttacctcgccatgcagagttcaacttgggtgatacggtggtgacaagtggttattctacagtattcccggcaggagtcatggtgggaacggtggatgatatgtccgattctcacgacggtctctcttatctattgaagataaaactggctacggacttcggtaaggtgggcaatgtgcgggtaattgcccgtaccggacaagaggagcagaagatgctggagaaggaagaagggaagtgatggagtgataaggtgatagggtgataggagtgataaatgatagggggtaacctcaatcgtaaattgtaaaatcgtaaatcaaattggttctcaattatctgcataaaataggttggtttatcggtttggtactattgcaggtactgatactgaataatgtgcatattgccggatatgccactccttttctatatatctatctcatactgaaattcgagtcggaaacgccgcggaatgctttgatgctgtgggcgttttttctaggactgacggtggatattttctcggacacaccgggtatgaatgctgcggctacggtggctttggcttttttgcgccctactttcctgcgtctgtttgtaccgcgggatacgttcgaaaatatagttccttcaatcaaatcgatggggattgttcctttcctgaagtatttgattgttagcgtttttattcatcatgcaatattacttaccatagaattcttttcgttcgcccatatcggaacgttgctgctgagaattgtggcaagtacgttgctgactgtaacctgtatcatggctatagaaggagtgaagaagaagtaagatggcaaaagattatacactcgaaaagcggaaattagtgataggtggggtagcaattgtgattgttatcatttatatcatgcgtctttttgtgttgcagatcatgactgatacttacaagaagaacgcagatagtaacgctttcctcaataaaatccagtatccttcgcgcggtgcgatttatgaccgcaatgggaaattgctggtgttcaatcaacctgcttatgacatcacatttgtgccgcgagaggtgacggaactggatactctcgatttttgccgtacactgaatattacgaaagagcagttgctgaagcgaatgaaagatgtgaagaaccgttggatgaatcccggttattccagatatacacatcaggtgtttatgacgcagctctcagcggaagagtgcggtgtattccaggaaaagcttttcaaatttccgggcttttatattcagaggcgtactatccggcaatattcctataatgctgccggacatgctttgggggatatcggtgaagtttcaatgagagatattgaggctgatgattattacatccgcggtgactatgtaggtaagcaaggtatagagaagtcttatgaaaagtacctgcgtggtgaaaaaggagtggaggttttgcttcgtgatgcgcatggacgtattcaggggcactatatggatggcaaactggatcggccatcgataccgggcaagaatctgaaattaggattggatattgatttgcagatgttgggtgagcgtctgatgaagaataaaatcggtgcaattgtggctattgagccggaaacgggagagattttatgtctggtatcggcacctaattttgatccgcatctgatgatcggacgtcagcgtgggaaaaaccataatatgttgcagaaagataaacagaaaccgctgctgaaccgtgcgattatgggtgtttatcctccgggatctacttttaaaacagcccaagcgctgacattcttacaagaaggtatcatacagccgtccacatcgtttccttgttctcatggatttatttatggaggtttgcgtgtgggatgtcacggacacggatcaccacttccgttgataccggctattgccacttcatgtaatgcttatttctgttgggggctttatcgcatgtttggtgataagaaatacggttcgccgcagaatgcacttactgtatggaaagatcacatggtttctcaaggatttggttataagctgggaacggacttgccgggtgagaaacgtggatttatccctaatgcaggtgtttatgataaagcctatcgtggatcatggaatggattgacggtaatcagtatctctatcggtcagggtgaagttttaagtacacctttgcaaatggcaaacttagcggctaccatcgccaatcgtggttattttgtgactccgcatattgtgaaggatattcaggatgcagaattggatagtacctaccgggagcgtcgttacacttctattgaccgctcttattatgaagaaattgtagaaggtatgcgggctgccgttacgggagttaccggaagtgctacttgccgtatagccggaactatcctgccgggtgtagaagtctgtggaaagacaggtacggcacagaatcgaggacatgatcactctgcatttataggttttgccccgatggacaagccgaagatcgctattgccgtttatgtggagaatgggggttggggtgcaacctatggagtaccttatggtgctttaatgatggaacagtatttgaatggaaaactttcgcctgccagtgaggaaagagcggaagaaatgagtaatcgtgtgataatgtatggtgacgaggagagatagtatatggaaatcactggattgggtaacgatctgtgtttacttgattctgattgcattcggttggttcagcgtttgcggggcaagctatgattatggcgaccgtgacttctgggatttctccactcgtgcaggtaagcaactggtttggatcatttgctcttttggattggggtttgtgctgttgatgcttgaagacagcgtttatgatatgtttgcctatcttatttatatagcacttgccatattacttgtggtcactatctttatagcacctgatacgaaggggtcgaggtcgtggctggtcatgggaccggtaagtttgcagccggcggaatttgccaagtttgctacggcactggcgcttgccaagtatatgaattcctattcgttcaccatgaagaactggaagaatatcctgatgatggtttttcttattctgttcccgatgatacttattatcttgcagcgggagacgggctcagcgttggtatatactgctttctttttggttctgtatcgggaggggatgccgggggtagttctgttttccgggttgtgcgcggtagtttactttgtggtaggtattcggtttgatcaggtgtttattgccgatacgccgacgccgataggggagtttgctgtgctctcgatggtcttgctgtctgcggcaggaatggtgtgggtttataagaagaaatgggaaccggtacgcaatatattgttagttaccattggagtgttgttaatcgcttattttatatcggaatatgtgactccgtttaatttggtttgggtgcaatggggactgtgtgtgctggtagttggataccttattttcctttcgttgagtgagcgtcatcttagttatttcctgataggtatgtttgctattggttctatcggtttcttatattccagtgattacttctttaataaagtattggagcctcaccagcagatacgtatcaaggtggtattaggtatggaagaagatctggctggtgccggatacaatgtcaaccagtcgaagatagctatcggttccggtggcctgacaggaaagggattcctaaacggtactcagactaagctgaaatatgtacccgaacaagatacggactttattttctgtacggtaggtgaagaagaaggatttataggttctactgccgtgctactcttatttcttatattaatactccgtctgattgctgtggcggagcggcaaccgtctacttttggtcgagtctatgggtactcggtcgttagtatattcctgttccacttatttattaatgtaggcatggtgctgggattgacacctgtgattggtattccgttgccattctttagttatggcggttcttcgctttggggattcaccatcctgctgttcatcttcctgcggattgatgcaggacgtaaaaagagactgtcagcgttttaatttgattcctacatcattgataccgggaagaacttcgtccggtagaaggtgtataattttgaagcggtattccccggcttttccaatacggatgaaacctgctgggagagttgattgatataacccaccccagccatctcctaaccaaatacctgcattgtcagcaagttgcagttccaatgtatcccgcttgatatttgggacttccggactgtcgtagtagatgagtaagggcagattctgatatggataattgttccggtttctcacttctacggatacattgtagagtgtagcggagtctgtaaccgaaacattgaagaatagtgtgtcattccgctgccagccttccgttggcagggattgaaaagaatgatatacagtctgttcatcgcaggctgtgtagaagcttgcgatgaacagcagtattaaactcttcaggagagatgttttattcttgagctggtttttcatttccggctggtttctctccttgtggtctgggtggattgttgggtctgggacctctatcaacacgttgtccatctcctcgttcacgatttttttgcttgttgcgtctgacctgatcgccttgttgtctgggctggttcccctgttgccttggttgctcgccttgtggtctgggggtaccttgtgggcgtggtctggattgttgatctccaggttgattcggatttccttttttctttttcttgcggttgttattaccgctgtttccattcccgccaccgttattttctccgccatttttacctttacgactacggtcgaagcgggttaagctttcctgttccaacaaatctatcggcttcttgggttccacttggcgtgcttcttctacaagactttctggcttagtaccccgtttgttcataccgatgatttcaaatgcacgcttaccactgattgttaccagattggcaggaatgtttttgtcggtagagtaggttatctgattgcttagaatatctgccttgaagaaatagaaagtaccgtctttggtttccaactcgatctccctggaaggaagacgtttctgagcttccacatagcagtccacttcatagttgagacagcatttcagtttggcacattgtcctgccagtttttgcggattgagagaaatatcctgataacgggcggcacttgtggatactgacacgaaagaggtcatccaagtggcacagcagagctcgcgtccacaagggccgataccaccaattcgtccggcttcctgacgagcgccaatctgcttcatttcaatgcggacatggaaagcatctgccaataccttgattagctggcggaagtctacacgctcatcggcaatataatagaaaatagccttgttaccgtctccctgatattccacatcaccgattttcatgttgagattcaggttgagggcaatctgccgggcacgtatcatggtgtcatgttcgcgtcctttggcttcattgtatttgtccatatctacctgtttggctttacggtagatacgcttgatatcagcctcagacttgatgttagcttttcgcatttgcagcggaacaaggcgtccggttagggttactacaccgatgtcatgtcccggtgttgcttctacggccacgatgtcgcccttttcaagaggtatatggttgctattgcggaaatatcctttgcgggtattcttgaactgaacttctaccagatcgctttcttctccgtttccgggaatgtcggccagccagtcgtaggtgttcagttgcttgtcttgcctgccgcaacttttgcagcagagacttccgcttccgttatgtagtttaaaatccattttttttatttatgattgagattactactatatatctgatttctactgtttcagtagaactatcattttcaatgaaaaatcaaagaagaccatccttgcatttacattttgctcaatatgtatctgcgcttcgctcaattcatccatcattcccattacattccgttcgttgataaaaggggcgaagcgggtggcaaagttttgttcgggcagagtcatgtaactcatctctttgcaatgcaggttatagataaaattctcgcgtatcatacgctgggcgtatgtcaggaagttcttctgtcgttcgcgtcccatgcctgccagttgctcactccattgcttcatttcacgtatcttccgttgataggaaagacgcatgaggctgacaaagagttcaaagaacagttcattttcttcgtttaggtggatggtttccaatgctttgataaagtcaccgttggcaagatgcgccaaggtgaaactatcattaggacgtacaccgtatttctgttgcaaggcgttggcaatatccgtttcttctattttacggatgttgaaacgttgcgtacggctcaggattgtcggcagtatcatgtccggagtttcggatatcaataggaatactgtcttttcgggaggctcttccagaagtttcaataacttattggcgcaaactacgtgcattttctccggtagccagacaatagtaaccttgtagccaccttcgcttgatttcagactgagcttgcgcactatctcgtcactctcctttgcatagatgatggcttgcccgttttcagcatccatctcattcagccagtggtttagactgaaataagggctgttcagcaccagatggcgccagtcagctatataatcgtcgcacacttctttctttcctttttttacgatgggaaagacgaaatgtacatccggatgtaccagcttattccactttacgcaggagggacaagtaccacaggcgtctgtatctgtacggttcgggcaacagatgtaacgggcataagccattgccaacggaagttttcccactcccgatggaccgcagaagagctgagcatgaggaatacgcccctcttgcacttcctgccggagtcgctgtttggctgcttcttgtcctattacctctttgaaaaacacgatattctttatagtttaattatcaattacaattagattactccaactctcaactctccattctcaactttcaacttctcctagtataccagttttgcaacttcttttatactgtctactgcaccgatggagtagaagtgaatactaggtactccatgttccactaattccttacattgcttaacacaccattcgatgcctacttgtttggcttcttcatccgttttgcatttcatcgcttcgcatgtcagctcttcgggcaagtccactttgaacgtcttgggtatcatggtgatttgagatatcttcttgaacggtttgatacctggaatgatgggaatggtaactccggctttccgggcacgttctacgaagtcgaagtatttctggttatcatagaaaagctgtgtgacggcatattctgcaccggcttccattttctttttcagccagtagatatcagtgtcaatattgggagcttcttcgtgtttttcgggataacatgctacgccataggaaaatggtgtattggtcactttcatttccgagccatctacgaaaatacctttattgaagttattgatctgttcttgcaattcagtggcatggtggtagccatcgccttcgggagtgaagacggactcatgttttgctttatccccacgtaacaccagtaagtcggtaatacccaggaattgcagatcgagcagtacatattccgtctcttcgcgggtgaaaccactgcaaagaagatgcggaactacagtaatattatatctgttttggatagcggcagctacggcaacagtccctgggcggcggcgcaagcgattgcgctgaaacaaaccgtttcccagatctttgtacacatattcgctgcgatgtgtggtgatattgatgtatttcgggtcaaattcccgtaaagtatctatggtgtcgtacagcttttcgatgcctgtgcctttcagcggtggcagtatttcaaaagagaaagctgtcttctcgttgctgtgtatcaggtcgataattctcatttctttttcgttgtctttgttcggtgaacaaaacttatttgtacattgggaacaaaaatacgaaaaagaaatgagatatgcttttattgttgggctattcttttatacaacgtataggaacagctatataataatctttgtctttcactttattactgccagtgtcgttaatatcgtttgatgtacttttcatgaaaataacggtttctgtcaatccattcacgtcatctcctatccaatagaaagctgcggcagactcatttatcaaagctgttttatttccactttctgtatacactccgtaaggataaaaacttaatccagtctcgttagtggcaggggatacgatatctcccgtcttaaatggtatccaatctcctgtttttaaaacagaaatatcattcttgatatactgccttagtgaatcccaatctccgttattaggtattttccatccttctggagccaagttaccagctaatatagcttctccattatagaagtatatttcatctttttcgggtttaaaataacctgcttccttgcctaattctacttgtttagtaagaggagtgccgtttctgtatgtagttgcgcacaagtctttctgcatccaatattgtatgcctatttttactataggatattcttttaaagttccattcctgatatctctaatcgtatgtcgtataacatttatatccaaaggcttttcgggttttattaatgtgattatccctgattcattcagatagaatttatcaatttttccagaagtacctgtagtatatgtaaacgaattatcttctgtattccaacttatttttcctccattgatctctctttcatcatctaatagttgtagtacagttccattagtaaggtcgctttgttcatcggctccgataggataaatagtgattgcttgtgaactaatattatctgacctaagatattctttgcaaatttctacaataggtttaccgctactatatactttataaacatttgattgggtaaaagataatgcggcaatatgtattgctgtagttttgccgctattatctgtttccttaccttcaacagatgtccagtcttctatgttgccggttattcctgtcaatatatgactggtagtctgcatggctgctatgtccaggtcacattgtgtattttctgtcattgttaattccggcattgggcatgtgtatagttgtccattccagtccatgacgaatgattgtatatcggattttatatcttgaggaataatgataatctcttttcctataagtttcccgttttttatactccatgttccgtaaggaataatatctgtttcttctttatgatttgtaaattcccctgtggtcaaattatagtcggctttattatagaatccggtagcaatgattcgtggattagcacttagtaaactttcaacagtttcatctcctttgggggtaagtgttatgttgaatttgactaatttatgatagaatttcagttcaacagctttttcactacttgccacttttgactgtgttgcgattagaaaatctgattgtgaacgtttaataggattgctttgatctgactgtatagagattggaataatggaagaattggcagatatctccgttggtaggtaaggggaataactgataaaatcaagggttgcatctcctaccggatagaaaactgttttttgggggataagcgtactacttcctgtacattctaactgcaaattgttgatatacctttcttctgcaatagaagtggaggatagcattgcgtataatcccactttatctcctttctcgaaggttgtatttgtcactcgtgtactcgttttattgatctttgttgaaaatgtgataggggtagttcctggagaagtctctgaatctaacttattgacacaagaagaaataggtagaaaaagagaacataataaaacagaaatcaatctgttacttttaatagttgttttgctcatttgttgctattttatgaaatacaattgttgtatttctagttagtacgtagctctatctgttaattaaagcatcggaatatctgaggtgggtaaggaccataattggtataagaaagtctgtggctttgggatgctaattaattgaattcacgcttgaattccagttctattccatcttaatgtttttcaatgttcattaacgctgttggttgacaaaggtaaaataataatctaaatatctgaaagaataaaccagtttctgttaaaagtatttttatcttcctttgtatgaagtgaataaatgaatagcttttgtccctacattttcattctttcgcgggagatttcaaaattatcagtacctttgtactctaaattaaagataatctgataacttatgccattaaatttacctgataagctgccggcgatagagttgctgaaagaagagaacatatttgttattgacaactcccgcgccacgcaacaggacatccgtccgttgcgcatcgttatcctgaacttgatgcctttgaagattaccacggagacagatcttgtgcgtttgctctccaatacaccgcttcaagtggaaatctcgttcatgaaaatcaagagtcatacatcaaagaatacgcctgtagaacacatgcagacattctatactgactttgaaaagatgcgtggcgagaagtacgacggtatgattatcaccggtgctcctgtagaacaattggatttcgaagaggtgacttactgggatgaaataatggaaatattcgattgggcgcgtacgcatgttacgtccaccctttatatatgttgggctgcacaggccggactttatcatcattatggagtacccaagtatgcgttggataagaaaatgttcggcatattcgagcatcgtcctttagatccgttacacgctattttccgtggtttcgatgatatgttctatgtaccccatagccgccataccgaagtacggaaagaagatatcttgaaagtgccggaacttactttactttcggaatcggaagatgcaggcgtacatctggtggtagcacgtggtggacgtgagttctttgttaccggacattcggaatactctccactgacgctggatacggaatatcgcagggatgtggataaaggtctgcctattgaaatacctcgtaattattatgtggataatgatccggataaaggtgtgatggtacgttggcgtgcccatgccaatctgttgttctctaattggttgaactatttcgtttatcaggaaactccgtacaatattaacgatataaagtagctacaagctacgggctacgagtgacaagaccttgcggtgtatagcgtatcactcgtagcttgtagcctgtaacttgtaactaaaacgatatgataaagcaacggaagatagagttattggcccctgccaagaacatggaatgtggcattgaagctattaaccacggtgcggatgcagtgtatatcggtgcacctaagtttggcgcacgtgcagcagccagcaattcgttggcagatatagctgctttggtggctcatgcccatttatataatgtccggatttatgtgactgtcaataccatcttaaaagaagaagaactggcagagacggagaaaatgatttgggatttgtatcgtgcgggagtagatgccctcattgtgcaagacatgggaatcactcgcttaaacctgccgcctattcccttgcacgccagtacgcaaatggataaccgtacaccggagaaagtacgtttccttgcagaagccggtttccggcaagttgtattggcacgtgagctttctcttcaggaaatcagccatattcataaagcttgtccggaagtgccgttggaagtatttgtacatggagcactttgcgtcagttatagcgggcaatgttatgtcagccaggcttgtttcggacgtagtgccaaccggggagaatgtgcacaattctgtcgtttgcctttcagtctggtggatgccgacggaaaagtaattgtacgtgataagcatttgctatctctcaaagatttgaatcagagtgatattctggaagagttgcttgatgcaggtgccacttcgctcaagatagaaggccgtctgaaagatgtttcttacgtaaagaatgttacggctgcttaccgccaaaagctggatgctatctttacacgccgtaaagaatacgcccgggcctcttccggtacttgtaattatacattccgtccccagttagataaaagttttagtcgtggatttacgcattatttcctgcacggacgcagtgaagacatcttctctttcgatactccgaaatccctcggtgaagagatgggcaccatgaaggaacaacgcggaaactacctcacagtagccggattgaaatcattcaacaacggtgacggtgtttgttatatcgatgagcaaggacgcctgcaaggcttccgtatcaaccgtgtagatggaaataaactctatccggcaggtgagatgcctcgtatccgtccgcgtactgtgctttaccgtaactatgaccaggagtttgagaagttgctggcacgtaagtcttccgaacgaaagatttccgtatccttgcttttggcagatactgcctttggctttgctctgactgtcacggatgaggatgataatagcgttacactttctttccctcatcagaaagaacctgcccgtaccccgcaggcagataatctgcgtacccaactcagtaaattgggaaatactccttttgaagccggaatattagcggataatcgttcgcctgaaacaaattccgccatagaaatccgcttttcagataactggtttcttcccgcttccgtagtagccgattggcgccgtcaagccgtagacaagctggttaccgttcgccgtattaattatcggcaggaagtggcagtctggaaacctacaactcatgctttccctttgccgggaacttcttctaagacaacagcttccgctacttcattaacgtacctcggtaatgtaatgaatacccgtgccgcctctttctataccgatcacggcattgctaccgtagctccggcttatgagaaacaatctgtaccgggtgctgttttaatgttctgcaagcattgtttgcgttatagtatgggttggtgccctacttatcagaagggacgttcatcctatcgggaaccttattatttgcaaggaactgatggtaagcgcttccgcttggagtttgattgtaagaattgtcagatgaaagtatatgcggaataagagagaacatattcgttatcaccacagagcggtacagagtaacactgagtttcttaaatatcagaaaagactccgtgcaactctgtgttactctgtggtgatagcgattattatcagtctggtttcctgccgttactctcgtcccaatctggatgatgaaggtatcagtgataaaacccgtgactctctgacctacctttacgaccggcattatacgttgaatacgaatctggaagtggtgcaggattccgtggtgcttgcctgtctgccagtgaaggattgctacaatactctgtatagaggagaccgtgtagtagtggccgaatttgccattcattctgctgatagtgtggacagtgtttgggtaaaactggctcattcccaggagatacaaggctggatcggggagcgggaaatgatgcaagcttttgtacctacggacagtatctcacaattcatttacttgttcagtgatacgcatgcttcttacttcgtgattattttcgccttgtttgtcggtgcctgggtgttccgtttgttccgtaggaagcagttgaagattgtttatttcaatgatattgatagtgtatatccgcttttgctctgcctgttgatggcattcagtgctacggtgtatgagacgatgcaagtttttgtgcccgaaacgtgggaacatttctattttaatcctacgctttcacctttcaaggtgccgtttattctctcggtctttttgctgagcatctggttgtttataattgtactgctggcagtactcgatgacttgttccgtcagttgactcctgccgctgccgtattttatctgttgggattggcatcttgttgtatcttctgttatttcttctttatactgactacacaaatctatatcggctatattttccttgttgttttccttgggcttttcctaaagcgaatgtgtgccacacttgtcatttaccgctatcgttgcgggcgctgcggacagaaattaaaagaaaaggggccttgcccaagctgtggtgctatcaatgaataatagggtgtagcaagttctcttaaccctttcatgcttatgatacttacttttcccctctttcctgcttagatgtaatgtaaaagatggcatcttttgctgcgaaagataccatcttttgatgttagagatgccaccttttgcgacaaaagatgccatcttttgcataacgggttagggagatgtatggggacggaagtaatgatctctatcagaacctgcaacgtagttcgattcccgcctgtatggggcggcctttctgcatgaatccgttgcccatgctttcaaagtagaaagcagcgtagtctttatccagtgcattgcgaacccagaagtcaatctgtccgttgcctttttgcaggctgaggcgtccgttcaatgtgccgtagaaagcttggctgatatcattctgctcggtccaatagatacgtcctgcaccggtgtagttggcattaagttgaatacggtccaaccaatgtcccgggttgatgcggaaaatgtattgtccgcccaggctcagggtgtgctttggaacgaaaggaacatagttgccattgtaacttatttcttctaatttactgttggttgttatgtaatctttgaatgtggcataagtataaccgtagcttgcagtcagggtaaagttagtggtaactgcacccatcagagatatttctgctcccaggctgcggctctttcctgcatttaccgtctcgcgtccaagtccgctctgggcgaagcgggaaatctgctggtcgcgcgtttcaagccagaacagggcggcatcggcacgcagacggttttggaaaaggtttaggtgagtacctatttcatagttccaggtttgttccggtttatatacggtggcagcccgggcatccgggttttcgccggcatcgggtataaagttcaccatatctttaaggttttcgggaacctgggacatgatttcatctttggtcagcctcatcatatcgttcttcagactcgcttgcaacaggtcggagaacatctggatgttgtatcctcccgaacgatatcctttgctgacggtggcgtatacatttccgaggttcttcgggaagtcatattgcagggcgaacttcggcaatagttgcagataatccttgctgatggagccttgataacgtgaggtgacggtcagtgctgtttccggcatcatggaaatgggctttcctgtgggcgctccgttcatcatcatctggcccgtaatacctatggtgtagtccattgctgtaccggagttataatccatcttcattttctcatagtccagtcgaaggccagcggtgaatgatactccatcgataccgaataaatctctgaatgtggattggtggaacagagctccgttcagaagcggtgtcttgaagtctccattgatgggcaggcgggcgctggttactttcagtgcgggcatgatgttcatatttcttccgggtcccatcggtacctcaaccagtgctgggatgaagcttcccaacatctgatccatcatcgccataccatcttctttgaatgtgaccggtgcagtagtatttagccattggtagaaaccgaaaatgcctgtagcccattgccagcggtggctttccttgctcttcattacgatttcttcactgatggtgttgatgcgctgcttctgttcgagggtataggtgtttttagctgtgaaatcctgatccagaaacatacgatcctttagatgctgatatccggttacggcactgagtgtgaaattctgtgcctggtactctacattaagtccggcattcagcaggttgcggtaatagctactttcatcattgtaagccgttttggctacatctccggtttctttattgtagagtccatacgggtaaccgccctggtcaccatattcataacttacattaaagtcgagcttccaattgtcgctgggcaagtagatggcgcggatacgtccaccggcagactgccctttatctacctttttattgttgagcgctgcattgcggaagaaaccgccttcgtattcataaaatcctccagccgagaatgcaaagcgctcattcatccggtgatagtgagtgacggaagtattgtattgattgtgtgtacctgcccctatccggaagtcagtaccttgataagagaaaggagatttggtatgtactttaataagtccacccatcgcatttcgtccgtacaatgtaccctgcggaccgcgcagcacatcaatacgctcgatgtcggaataattgaaatcgaatgcagatttatctatataaggtatattgtcaacatagaggcctacggagggagtattgatgcgagaaccgataccacgaatgtagacggcagatgtcagtcgcgaaccgtaatcaggaataaatatattcgggaccagtgctgtcaggttctttatggagttcacttgtgcagcttgcatgtcttgttgcgaaagtaaggtgacggcattgggtagctcgcgcaacttacggttttctttaggtgctgcaatgatgagaacctcttcaacgtccactattttcagggtatccacttcttctgccgtaatgtttcctatgggtaggagtgccaaggcaaaaatcaacaatttactcttattcattctttgtcttttaggataaatgataatttagcggcgaaaatgggtatagaagtatctcagttctcctcctcttgggaggaggagtacccgtagggggaggtggtaggtaaaataataaaataccaatacatcaataagacaaaggaatttctctcttacctaccaccccgccctttgggcacccctcctcccaagaggaggggaattaagatagtcagaatatcataactacactgttaaattatcatttataggtttctggttgcaaagtaagagcatttcccctgtctccgcaatcctcatttattaggatttagatacggtctgcttcaacgtacccgtgcattacagcataaatcgtcagtccggccactgatttaatgcccagcttctccgtgatattctttcggtgggagatgacggtagtcagactgatattcagtttatcggctatttctttattgataagtcctttggttatcagtaccagtacttctatttcgcggggagaaagatcatgttcgctgtcggcatgaggattaccgcacggatgcgctgttgcaccgtggggatgtccgtgggggtggctatgaggatgtccgcctttgtgtccgaactgatgcagttgcaggatgtttctgatcagtgttttctcgtcctgataaatattcaaggtcggtattcctgccagttgaggctgattgtcaccgtttgccaatacaatggtcttgggtttgcgcggcaggaaaaaagcggtatgctcaaaatatatctgtgctgaaacaaaataatgcgcgtacatatcgggggtatcgtccatcagttcctcgaacgaactgaatgcacggatgacggccatcgggataatttcttccagaaggctttgcaatcccatacatgataaggtgttggagtcagcaattgctatttcgggagctaccatagtatttcttaaatttctgcaaaagtacagataaattttagtatgtaggctattgtgattgaaaaacagtaactttccttaataggttgtcatagaactttgcgctcttctcttttgttgttaagtatataatttacttaatactactgatttatgaaatatgatatagctatcatcggcggtggccctgccggatatacggcagccgaaagagcggctgcaaacgggctgcaaactgttttgtttgaaaagaaagctattggcggtgtttgtctcaatgaggggtgtatccctaccaaaactctactctattccgccaagttgtgggacaatatgaaaggcgcgtccaagtatggcatctctgtgcccgatggttcgtcattcgatatgaaaaagattattgaccgtaaagataagattgtgaaaaagctgaccggtggtgtgaagatgaccgtcagttcttacggtgctgttattgtaccgcaggaagccgttattgtgggggaggcggacggacgtttccagctttcggctgccggcgaagcatatgaagtaacctatctgttggtatgtacaggttccgatacattgatccctcccattaaaggattatctgaaattgattattggacatcaaaggaagcattggagatcacaactttgccccgttcacttgtcattatcggcggtggtgttatcggaatggaattcgcctcttttttcaatagcatgggtgtgcaggtgcatgttgttgaaatgatgcccgaagtattgggcgccatggataaggaaaccagtggcatgctgcgttcggaatatcagaagcgtggggttaatttccatttgaatgccaaagtaattgaagtcggcaaagagggtgtcactattgaaaaggaaagtaagactgcacttatcgaagccgaaaaggtactcgtcagtgtgggtaggaaagctaacttgtcccaggtcggtttggataaactgaacattgaactgctgcgcaacggtgtgaaggtggatgaacatatgcagacttcccatcctcgtgtttatgcctgtggtgatattaccggacactctatgctggcacatactgccattcgtgaaagtgaagttgctgtcaatcatatcctgggggtggaagaccgtatgaattacgattgtgtacccggtgtggtgtataccaatcccgaagtagcgggagtaggtaagactgaggaagaactgaaagcatccggtatcagttattatgtacagaaactaccgatggcctattccggtcgttttgtagccgagaatgaattggtgaacgggctttgtaagttgatattggatgacgatgatcgggtgataggctgccatatgctgggaaacccagtttccgaattgattgttcttgccggacttgccgtgcagcacggatatacggtggaagagtttcaaaagactgtttttccgcatccgacggtcggtgaaattttccatgaaactttgtttgcgtaatgttctgtattgataatcgctgcacggatatctattttaatctggcagcagaagagtatttgttgaagcagaagcgaggtaacttctttatgctttggcagtcggagccatccgtagtgatagggaaacatcagagtgtggcagcggaagcggacgagaggtttctggatgaaaaggggataaccctggcacgccgtttttccggtggaggtgctgtatatcatgaccggggaaacattaacctgagttttattgaaaccgtaaagcagccggactttgtatattacctgcaacaggtcgtcgatttcctcgaaaaggcaggtatctcagcttatgctgaccagcgtctgggtatttatgtggacgaacggaaaatatcaggtagtgcgcagtgcatacacaaagaccgtgtgatgtatcattgtactttgttgttttctactgatctggatacgttgaacgcggcattgaatggcgatccggatgcggaaagccgtttaccgggctctcgtactatgcgtgcagtaccttccgtacggagtgaagttgcgaatataaaagagtttttgtctgagcctatggacatcaaacgtttcatgcatttgctctttcactcctttgtggatgatgacgataaccggatttaccgcttctctgccggagatatggaagccatcgaacggttgaaagcggaaaagtatgcctgcaaagagtggatatatcataaatccgcattaacttttacttaagttaaaaacttactactcagttgtttgttgtatatataataaaccgagaacctaaaacttaactatatgtcaagatttgaaataaagatgcccaaattgggtgaaagtataaccgaaggtaccatcatctcatggtcggtacaagtaggagacatcattaaagaagatgatgtgttgtttgaagtaaataccgctaaggttagtgccgaaataccatctccggtagaaggtaaagtcgtggaaattttatttaaggaaggagataccgtagctgtgggtacggtggtggctattgtcgatataggaggtgaaaactccgaggatgaggatagcgtagaggctctccaaagttccgccactgatgagaatgttgcggttgtttctaaggctgcctctgaggaaactcctcaagtcaaggctgtaaaatcggaagaagagcgttggtactcgcctgtagttcttcagttggctcgtgaggccggcattcagcctaaagaactggatactattccgggtaccggatatcagggacgggtgagcaagaaggacatcaagagttacattgtccggaaacaaagtggtggtaccgctacggcgcagcctactgctaagccaagtacgcaacctgttgcaagcgttgcaccgcaaccggtagctacagcacctgcccagtcgtctgctaaacctgctgcaactcctgaagtacaacgtactacaccagcttccggcacattctcagcagaaggtgtcgaagtaaaagagatggatcgtgtacgcaaggtgatagccgaccacatggtaatgtctaaacatacttccccgcacgtaaccaatgttgtggaagtggatgtaacgaaacttgtgaagtggcgtgataagaataaagatgctttcttccgtcgtgagggagtgaaacttacgtatatgcctgccatcacagaagctgtggcgaaggcgctggctgcttacccgcaagtgaatgtatcggtagagggatataatatcctgttcaagaaacatatcaatgtcggtattgccgtttctctgaatgatggcaatctgattgttccggtggttcgtgatgccgatcgtctgaatctgaacggacttgccgtagccattgattcactggcactcaaggctcgtgataataagctgatgcccgatgatatttccggtggcacttttacgattacgaacttcggtacattcaagtctttgttcggtacacctatcattaatcaacctcaggtggctatcttgggagtaggatacatcgagaagaagcctgccgtaatagagaccccggaaggggatgtgattgctatccgtcataagatgtatctgtccctttcttatgaccatagagtcgtggatggttcattaggtggcaacttcctctattttattaaagattatctggaaaactggaaagaataacttaataccttgatgagtatgaaaaagtacaatataaaaaccacagatgtggaactgctgaagaaatggtattacctgatgacgctggggcgtgcgctcgatgaaaaggcgcccgcctacctgttgcagtcccttggctggtcctttcacgctccgtatgccgggcatgacgggatacagttggccatcggacaggtatttaccaaaggagaagacttccttttcccttactaccgtgatatgctgactgccctttccgctggaatgacggcagaagaacttatactgaatggcatctccaaagctactgatccgggaagtggcggacgccatatgtccaatcattttgccaaacccgaatggcatatcgagaatatatcctcggctacaggtacgcatgatcttcatgcagccggtgtggcacgtgcaatggtatattatgaccataaaggagtcgttattacttcacacggcgaatctgcttcatccgagggctttgtctacgaagctgtcaatggtgccagccttgaacgcctgcccgttatttttgtatggcaggataatggatatggtatatctgttccgaagaaagaccagacggcagcccgtaaagtggcggataacttctccggattcaagaatctgaagattatccattgtaatggaaaagatgtgttcgactccatgaatgccatgactgaggcccgtgagtatgcattgttgaaccggaatccggtaatcgtacatgccaattgtgtccgtatcggttcccattccaactctgacaaagatactttgtacagggatgaaaatgaactggcttatgtgaaagaagctgatccgttgctgaagttccgccggatgctgttgcgttacaagcgtctcaccgaagaagagctgaaagaaatagaggagaaagcaaagaaagatctggctgctgccaatcgtaaggcgctgacagctcccgatcccgatcctaaaaccattttcaactatgtattgccggaaccttacgaaccggaaaaatataaagatggaacacatcgtgagacagaaggagagaagaaattctttgtaaccgctattaatgaaacgctgaaagcagagttccgtcataatcctaataccttcatctgggggcaggatgttgccaatcgggataaagggggcgtgttcaatgtaaccaaagggatgcaacaggaattcggtgaagctcgtgtattcagtgcacctattgccgaagattatattgtcggcacagcaaatggtatgagccgttttgatcctaaaatccgggtagtgatagaaggtgcggagtttgccgactatttctggcctgccgtagaacaatatgtggaatgtacccatgagtattggcgtagcaacggacagttcgttcctaatgtaactttgcgtctggcttccggtggttatatcggtggtggactctatcactcgcaaaatctggagggcgctttggctactttgcccggagcacggattgtttgtccatcctttgctgatgatgctgccggactgctccgtacaagtatacgttcccgtgggtttacgctgtttattgaaccgaaagcattgtataattccgtagaagcagccgccatcgtccctgatgattttgaagttccttttgggaaagcgcgcattcgtcgtgagggcagtgatctgagtattatcacctatggtaatacaacgcatttctgcttgaatgttgccgaacgtttggaaaaagaaggtggctggagtgtggaagtgattgatatccgttctttgataccgttggataaagaaaccatttatgagtctgtgaagaagaccaataaagccctgattgttcatgaagataaagtttttggtggcttcggtggtgagatagcagccagtattggtacagacttgttccgttacctggatgcaccggtacagcgtgtaggctctacctttactcctgtaggttttaatccgatactggaacgtgccattctgccgggtgcagatagaatttttgaagcagccaagaagctgttggaatattaatttaataataagttattatgaaagagataggattattttatgcaatgaatgctgccaagacttctcatatcgcagagaagatacgcgagaagctcggacacaaagaagtagaaatgatcatgatagaaaaggcttggcagaatgatttccaggcttatgataatctgatagtaggtgcttccacctggttcgacggtgaattgcctacctattgggacgaaatgataccggagatagaaagcctcgatctgaaagacaagaaagttgctctcttcggacttggtgaccaaatcggttatcccgataattttgttgacggcctgggaatactggttgatgcctttgaaaaggcaggggctatccttgtcggatttacgtctgccgagggttattcatttaaccggtcaagagccttgagggatggtaaatggtgtggactggtgattgatatagagaaccagtcgaagctgacggataaacggatagcggactggtgtgaacagttgaagaaggaattctgattccttcgagatattgaattaattagttctaaataacagttaccggtctattgaatagagatagatcggtaactgtcgtttagaattagctatgatgttaatatcctggattttgtgtcaaattgccattaatttgaatctctgaaaggggaattggccaaagttcgcttttgcctatagtaaagactctgcgttggcaaatagcatatccatctttgtctacagcgctggctgtgtaattatccggatcagtagttagcttcatgcctgtaaattgtctgtttagctcctcacttgctgtaccccaacgtaatatgtcataataatgtagtccttcaaaagcaaattcaacactacgttctctgcgtattatttctcttagactattggcagttgtttctgttacagccggcatattgacagattggcgtccgcgtaccttattgattgttgcatccagtaatgattgatcaatagcatcaccagcttccagttttgattccagataactaagtagtacttcaggatagcgaatcagaataaaattgccaccgtaattcattaaattaccattgaatcctccatccatgaatttggcgatacaataaccactccaaacggagtattttccatatctgtcgggagaatcactggatgggtcggcattatattctcttccttgaaaagaactttttccgctaatcatgactgtataaagcatacgtggatcacggttatcgtaagggttatcttcgtcataaagtggagattcttcgattgttttaccatcgatgcattcaaaacgcttgaccaattcattgtaaggagaaaattgatgccatcctccgtttacttcaggatagagatattggggaagtacatgagaaaagttgtcagctacgtattgagaagaaagcaatatttctttgctgtattcactcttttcccaaaataattcgctaaagttgtcttctacaatgtaaacaccggaatcaatgatttgcttataaacagttgctgcttccgaccatttcttctggctcatcagagcgcgtcctaaaatggcataggctgcaccctttgacattttgcctagctcagaatctggtaaagtctcaggaaggtcagctgcactttctgtcagttcattttctataaactcccatacctgactaaccggagtacgactgacggaatttgcttcttccaatgaaagtacagtggtgaccagtggaacatctccccaaaaagtagctaaatagaaatagtgataagcacgaagggtgcgcacgtctgctttcattcgcttctttgtgtcatcattcatattgatattgtctatatgatccataaaattgttgcatgcaacaattgttttccatgtttctgaccaatattgattgggtacccagaaagaagagttcattgttccatcagtcactccatcaggacgcccttctttttcagaaccgaagcctgccatcaagtccagccaaagcatggttcgtggtgcccagaacgtattatttacccatccggaaccatggttatagcagccggtccaggccatttgcgcatcactttcgtttctccagaaagtatcatctgatactttgtctaagggctgtttgtcaaatatactattcgagcaactgtgcattgtaacagaaaccattgttgctataaagaaagtacggactatattatttatattcaactttttcatatgacttaatttaagaattaaaatttcagatttattcccaatgaataaactgctgtgataggatagaaactttgtccctggctcaattccggatcccaaccttggtagaagttgtttatacagaaaagattctggccactaaaatagatacgggtattactgatatgcactttctgtgtgatatttgaaggaaatgtataacctatttgcagattttttactctcaggaatgttccgttacgcagccaataatcagaagtcatagtggtaccggcaccatcatttaatgaagttagtttgatatattgagctttgggatttggattttcttctgtccagcggttttccatctgccaacgttgaatgttgccactattatagaaagcataagcctgatagctgcccatctgctttttatatcctcctaagccctgtaatagtaatgagaaatcgaatcctttgtattcaccggaaatattgataccgtagctgaatttaggaattgtagaaccaagcactttacggtcataagtcgcatcaactttgccatcaggtacgccatcggggccactaatatctttgtatttcacaaagcctggttccgcattgtaaggctgtgaagcatagttgtcaatatcagcttgatcgacaaacaaaccgtcggttacatagccgtaaatagcattgagcgattcgcctacaaacagacctttatctatatccctgttttgtccgttggccagagaagttacctgattcttgtaataggagaaatttggagccaaatgcaatttgaagtttccgatgtttgtgttgtatcgaacacttgcttctattccggtatttttcacagatgctgcattgacttccgaaggagtcatccccagaatacttgaagcagaaatattataaagaatgtcatcggtacgtttgtcaaagtaatcgaaagtcacatcaaacataccattcagtacggtaaagtctacaccgaggtcgaaaacagaagttgtttcccaagagatattacgattagctaaagtttgtacagctgcacccgacgacatattattgccgaaaggataatctactcccaaagaaatggaattttgatagggataatttccgatattctgattacccaatttaccccacgaagctcgtaatttcagattgttgagccattctatgttatctttaatgaagctttcttctgaaagtctccagcctaaagatatggatgggaacaagtcccaacgtccactggatgggaaacgagaggttccgtcgtagcgtgcattgacttctaccaaatacttgtccatatatgaataattgaggcgtccgaagaaagaacgaagtccccactcgccgcccgaacctgaggctgtttgtccgtttgtagagccggcattaagttcataaagcaagtcgttaggaaattcttgacggtaagcttctccccaattagttatgtattcttcctgagaggcgccaagcaagatatcgaaatggtgtgcttcgatatcttttgaatatttggcaataaattgtaaggtagtcagggtggtattaccattggatacattcaaactgttgggtgaataagtcttattagcatcaaataccatggtcgaaatatatcgcttgttgtagtagttagaataattgtatccaacctttccactgaaagacagtccctttaatggttcccatgataattctacccctccggtgaaatttttataattttctttgcggaaagattcactatccaaccagccttcaggacagaataggtcttgataaccataagtaccatcactctttctgcctggaatagttgcattctcgcggacagacataccaatcatacgactcatgtcgccatctcccgtatagggctcgttggtggtagaggcatagccgctaagattggctttcagtaatagattagagagaatttgattatcgatgttaagttgaaaattgtatttagaataatcgttctgttcgacaataccttcttgatgtaagtaacccaatgagaagaaataagatagcttctcacctccattgcttagtgttacattatggccagtctgaaatcctgatccggaagttaccagatcctttaagtggtttacgttaggatagttatctgggtcggatccatttctaaatttatcaatatcattttgatcgtaagtagcagaaaggccactgtttttatctgcttcgtttctcatgattgcatagtcccaggaatcaagaaaatcgggcaactcagttgctttctgccaacctacatatccattatatgctacttgtgtaacgcctttcttaccgcgtttggtctcaatcagaatgacgccgttggctgcgcgtgtaccataaatggcagatgaggctgcatctttcaaaatagaaatattggcaatgttgttcgggtcaacgtcattgatggaagcagaaagtccgtctatcaaaaccaacggatcagaaccagctcccgaaaaggttcctacaccacgaattcttattgaggcttggtcccctcccggacgtccggatgactgactaacggtgacaccactggtgagaccagccaaagcttgggaagtttgagtgatgggacggttttcaatcgtttcgggagttatgcttgccacagagccggtaagatttactttcttttgtgtaccatagcccactactactacttcatccaatgcttgagtatcttcttttaaagtgatgctaatttctttcctatttccaatattttacttcttgagcaatatatccgatataagtaatttgtaatacggcattagctggagcatcgataacaaatcgaccatctatatctgttattgtacctattgattgaccttttactgtaacattagcgccgataatggtttctccatttgtatctttcacgacgcctgttaccttatttgtttggtttgctgactgattttcctttgttctgctcattagcatgatgttcttaccttccatggcataataaatattagtgccttcgaatactttattcagaacttcagctaccgatttattttctgcatttacttgaatagtacgttgcaggttgacttcgtttacattataaacgaacagatagtctgtctgcttttctatttcattaataactttacctgtcgagattttatctgctacgactgttactttcatcacctgagaataagattccgtggcaaaagccgtcccgacaaatataaacagggctaaggctgtgattttcataatatggaataaatgtttaatttctacaatagattcctgatacaaaatatttttcatatatttgcattacgaagttacgaaaagagtgtaatttattggaaatgagcgtaggttaattgctcttgatagtaataggttacgatttagttagttatctactgcattatccttctgcgcgttgcgtaaccttcaaagaactcttcgtatgcaaaagtagctatttaattcgagattttgatataaactcccgttttttatcccctcattcataagaattttccgtaaaagcggtattgtccgtcggcacaccattgcccaaaacgagtttggaacaaacgtgtgccgactaccgcatagctggagaaaagggcattgcctcacgcctaaacgatgtttagacagatgaagcaatgcccctttcttttgcgcctatgccaagaggtgcttttacgggttttcaaatgatttttcttttttcgctgtctcttttgccggaagcggaaagtgaatgcagagtgtgtcagcctgccccatgaatgaaacaggcgcccacacacagccggacaaaccgggaagaatgattgttgccacccggctgaacaagttccgtcggatcggaaacaatcatacttcctttgttgtggtttgcccttttcacgcttccggtgatgtctttttccttttggtgattcttttttttacggattttcccctgaagtttttttctacacaatctgcctctgttttcgtttacctccattttgcgcctttcagtaagccgcatcagtcagtcattttcgttctgggcgcaaaggtaattccgggattggacgggaaagcaaggtcaagcctcctgttttcggtaaaaatctccagccctgcgggtagtattttgaccgaaaaaccttgcattccctaatccctaccttttcaagcacccgaaacgaaaacgaccgatgcgacagaaagacgcataaaaaaaatgtcggataaacgagaggcagataagatagtttgaaactcaactccctcagctcttgaatccgcattaaaaacaaaaaaatcaaaaacagcgaagatatgacggcaacggcaaatttcagacaaatggcgcaacacatcgggttggcgatatgcggcttgatgatgcgcaccgccttcggggtgttcggcatcctttggggcatcatcagagagattgtaaacggagtgttccgagtggcgataggtgtaatcgtggctatcctttccaccattgccttctttggcttcatcctttggttattcaccctttaacccttaccgacatggcaaaaagaaacagcaagacggcagcgcagcagtgcagatattacgaggtggacaacatcttcgtgtatatggtggaaacgtacatcaacggcaattttgaaactttccgaagattgtaccacgaactgaacaaggacgcacggagggatttcatggacttccttctcagcgaggtagagccgacctattggagagagatactgaaacagataatctaaaaatgacagcgatatgaaaggaacagaccatttcaagagaacgatatatatgtacttggaacagcgtgcggaggaagatgcgctatttgcaaagaagtaccgcaaccctgccaagaacatggacgagtgcgtgacccacattctgaactatgtgcagaaaagcggttgcaacggtttcacggacggagagatattcgggcaagccatccactactatgaggaaaacgagatagaggtgggcaaaccgatggactgccaagtggttgtgaaccacgttgtgaaactcacggcagaggaaaaggcggaggcacgtcagaacgctgtccgcaaataccaagaggaggaactccgcaagttgcagaaccgccacagaccgtcagcgagaaaagaaaaccaaccccaaccctcattatttgatttaggcttatgaaaccgaagaccaagatacagaaagaggtggcaagactttccgccaaccttcgccccatatcagcgacacaaatagattgggcataccgccactgcgttgagcatatcggctaccgcaccaagaaagggaacatcacctgttccgactgcggtcacgagtggcacagcgacagcggactatgcgacacccttgaaggctgcacctgccccaaatgccatgccgaactcaaagtgcaggacacacgcagacgcatctacaaggaaacgcagaatttcagcgtgataaccacctgcaaagggtatcaggtaatccgcgtggcgcaggtcagatgcgagagcaggaaaggcgaaccgatgcgtttctactgccacgaggtcgtgcagcgttggatttcacccgacggcaaggttacggacatggcgttgctccgtggcttccttttctgctattgcgatgtgtgggcattaggcagcgatatggaggtaagaccgcacaacagcctatacgatgatgtggtggcaagaagctgtgcatatccaaagatgaggatattgccccaactcagacgtaacggcttcaagggcgatttccacggcatctcccccgtgcgtcttttcaaagccttgctttcagacccaagaattgaaacccttatgaaaggcggtgagattgaggtcatgaaacactttcttttcaatacccgtactgccgatgaatgttgggcatcatatctgattgccaagcgtcacaagtatcagatagacaacctctcaatgtggtgcgactatctgcgtatgctcaaaaaactcggtcaagacctccgtaacccgaagaacatctgtcccgaagatttcatggcggcacacgacaacgcaacccgaaaaattgaagccatacacgagaaggaaagagccgcagagcaacgccgttgggagattgaaaggcgtgagcgtgagcaacagcgacaactccaacgaaagaaagatgcggaggatttcatcgccaacaaatccaaattcttcggcttggtaatcacggacgaggaaataatcgtcaaggtgcttgaaagcatagacgagtattacaacgagggcaagacgcagggcatctgcgtgtttggcagtggatactacaagaaagccgacaccctcatactatcggcaaggattggcgatgagattattgaaaccgtagaggtggacttgcgaaccctcgaagtggtgcagtgccacggcaagcacaaccaggacaccgaatatcacgagcgcatcatagaccttgtgaacaagaacgccaaccttatccgtgagcggatgaaagcggcatagcataacccctaaaacaacattgatatggaagtaagaattgaaagtatgatttgtgtgtgggatgatgcaatccccacgatgttccttgaatttgtgaacctcctcactctcacaacgagtgagggggaattgagaaagagcgtaaaggagtttgccgagaagcacgaacttgacaagtttttcctttacggcttcggctcacaccatttctacctgcaccaacgctacacaagcaaccccgaaatggtgatgaagaacagagttctgtcagtacatttttaaccatctaaaaagcaacattatgacaacacgaatgaccatcaacggagtaagcacctgcgcggaagcaggtacggagaaatacgagcgtttccaatcgggtatcggaagacgcaggcggacacttgtgcagtacgactaccgccaccccatagacagagaattgttctcttgtgtcaaacccacgttggacgagtgccgagccgcacgggacaagtggctgaacgcaaagaagggaaaggaggacagactatgaacacgacctatcaaacgctgatagtcaagttcagcgaacctatcacggcattggacggtatctttgacgataccggagcgtggggaacggacaccctcaaggggtggatagatgattacgaaagcacacgtttcaccgccaccgacagccatacggcagtcatcacgagcgagtacaatatggaatgtgtgaaagagtggctacaacggcagacccccatttccgaaatgcgagaattttgaacgggatggcggtgtccgcaccgccaatacttaaaaccctaaaaacaaaagatatgatagccaagacgatattacagcagataggcggaaaacgcttcaccgccatgacaggtagccgtgatttcatagatatgggcaacggcttacggatgagccttgcaaggaacaaaacaagtgccaaccgccttgacatcatctatgacgaaggggcagacctctacaatatgcgcttctaccgcaggacgttcagcaaaaagacctttgagtgcaagacaaaggacattgccgtacacgagggtatctattttgatatgctggaggaaatgttcacgatggtgacgggactttacacacgcttttgagtggcggggcggcgagagccgccctactttctttcagtgagcatgatggcggacaaagaaagtagcaaagaaacctttgtccaatctgcgataactaaaaaatccgcaagtaaaacttgcggaggctatatattgggtcgttattttttggtggaggggaatgataatctcgaaccgttgaactacacatttctgcttcgtctccatttcccccaacgatttgatacgttcaatcatttttgttgttcctttctgaattttcctaaatactttcttcataatttcgctatactttttatggttaataactatgttttgtattgctctcacaacacttacaacttgaagtgttatttggaaaccgataggcaaaaatggctcaacgatgtcaattaacgagaaaatcctacgataatctatcaagtgatagagcaaaagacgtgccaagttaaatatggcacgtcttttgccagttttgtcagtccttttatgggatatacaacagcgcaaactccgcctttctccgtttgagcagcatggcgtggcgttttcctttgtagttgcagaaggctatatactcacggtagatgttcctgtcaccagcttccagcttcttgattaaggtgcttttggggattgttttgctgcctaacagcttcgccggtcccacattgtaagctaacgtgccaagcaaaatcgaatcaaccccgaatttacggaacatggcgacaaatttgcgcaggtctttccgcaaaagttcatccgcatcccgttttgtcatggttcgtgccgaatacttctcgtttggcaaaagtttgtgaccccaaccgacgtatgggtagtgtttttctgagtgccagccttcaaagtagcggcagcataaaaaagcacgttccataagcggcagtcggtagattgccgcctgcccgtccgttccctcttggcggctgatctgcgcggacacagaacagaccgtcagaagtgaacagagcattgtcatgaatacacgcatcatttcaacaaggggctgaagttgccgatgggaacgatggtaagatcgtcgtcctttacattcctgttgttgaagtcaaattccagttcgtaggagttgctaaagttatcctccaccaccacgatgaaattatgcgcctcatcacccgccgccgtgtagtacaggcggaatttttcgttctccagcaggtagcggtcgttaggcaggaaggtgatgccgttatccattttgagcgagccttccccctcgaactggaaatagcggatggtatagagcgtacccgaaaagtcgccctcctttttcagttcacagcggatttccactgtctgcccctttactaccttgttcggcacgggcatgacctccaccgtgaagggataggactgctggatgtccatgtcatcgtcacatgacacgagggtgaatgacatggcggctatcaggcataacgccactgccttgaatattgatgttctcttgtttctgttgttcagtatgttcattgttcttcgatttttagatggttgtttttctgttttttcgttgtcagttgcaggtactcgttcaagtccttgcaaccgtcatagagggaggaacggtcggtgacacgttccccgtatcgcatggtaagtgcggcaagcgtccgccgtccggcttcgtcacggtcgaggaagcagccgatgcgcccgtatccgtccagcaatcccgccgccttctccacgttggcgactgagttcagcacaagacagtcagcgttaccggttacaccaagcgtcacggcagagagaaagtccatgaagccctcgaacacgaggcactcgtcagccgggatgtcattcgcctttaccagtgatacagacttcggaggtatgcaacccttgaaatatcggcttctgacttcatagccacctgccatgttcggaaagccaacggcaaaataccgtttcccacgcacaccgtagttcaagcggcagcagtgacgggatgcgatggcgtaagggatgccccgttcctctaaatactccgtcagcagtgagcggagcagcggagcgacctccacatcctcaaaaacggattcggtcggcttcgagagatagacgggcttttcccatccggcaaccgtcatattggcggcttccgctatgaacttcgcttgcttcatgaagtcatcgctttgcagaaactccccggcaagcgtgaagatgtcgccgcccttgcccaaaccgaagtcgtaccagagctgtttcgccacgttcacacggaaagaggatgtgcgctcgcccctgtacggggcaagataccacagctcgttaccgctccttctgacaggctcatgccccagccgtgcgagaaaatccgcaagcggcatccttctgacagcatctatttccgtcctttccatgcccgtgtcagttgatgatgaacttgataccgaccccgaactgcgtgtggaacttccgtgtgtcgccaccccaaaggcaacgctcccgcaggttggcaagcagggcgatacggtctgccacgtaacactccacatcgagcgtcagcgcaccgccgtagatgaaggcgtcccggtcgtgcagcgtggagccgtcatgcagcaccttcttcccccaatttaccgcctcatatccggcgagagccgaagccccggcatagacgaaaacaatctttcgggcgtccgacagtatcttgaagtaatagccgccctccgccgtgaactgcgccacgggtatcttggtgtccttgtagggattgttcttcaacaggtattcgccaccgaacacccacttgttccccttcttcgtgtaggtggagagagccgccccgaagctgtacccgccgtccttgccgccgagattgaagccgtccgccatgtccgccctcacctcgatgccctgcatcttcggcagacaccgctgggcgtgcgcctgccctgtaaaaagggcaagcgacgcgatgattattgcgatgtactttctcatggtcagcgtacttgaagttcgttgatggtacccgcgcgtaccaaatcctcgttctcaatcacgaaggactggtgacggccgccgttcttctcgttcaattccaccacgaggcacttgtcatcggggatggtgaacttcgccatcgtgaagaccgtgcgctcgctctttttgcccggcacgagggtggcgtagttctgcgcgcggagcggcagaataatctgctcctgcacggcagtacgcttcgcaaccttcttgtccacgattttccaagtgatgtagtccacatcgaaaggcacgttgctctggttctttatctccgtgtggaaataaagcaagccgttgtgcgtgtagatgcctttcaacaggtattggatgccgaaacgcttgcagccgatatgcttcacctcgcgcttgttctgtttgtggatggacttcatgataaggcgcaccagcatcgggctttcgctgcccagctctttcagatagatttcctgcgcgttgttcgggcggttcaccgtgctgccgtcatggatgaagtcgcacatctccacgttgagcaacagcggttcggcggcgtacttcacgttgaaggtgtagaaactgccgtcctccgtgatgacggacatattcgtttcgttgggaaaattccttacggtagccttcacacggatgatgttctccgctccgtcggctttcccggcaatcaggtcgggcgagcctaaatcgacatagcgcacctccgccggaaaaatgacgtggacggtcttgtcgtaggtcacttccagaccgtgcggcggtatcatgcggtcgaaggtcagcttgcgtgacagcccgtgatataggtcgccgtccgcctccttctgcggatagacctccttcgtcaaggtcggttgttcacttccgttggtcgtttcaacggttacattctcctgcgcgttggcagttatgatgcccatagcgagggcaaacatgatgattacttttctcattacttttggattttagtggtaatttttattgttttcaatatttttcttggtaaagcatgaccctgtacccggctttcagatgcaccttgacggttcgcatctttttggcgatgtactggctcgtgccttgtatcagccccttgcccaagtcggaggcgagctgcgccccggcattggtggagatgttgatgctgcttcccagcgagccgcccatgttggcggcgacctcccggacggcgttcatctccatcgagttcgggatgaagatgccgggctgtccgtccgtgtcatagaccgcaagctccacggggataatcgtgccgtcgtattccagcgaggtaatctcgatgtcgagccgctcaccctgtatcttgcccgtgccgaccaccaccgcaccccggggtattgtcctgcctgccaccgccataggctccagcaggcgcagccttaccgtctgcccgtccgtcacgctctgcgccccatgcacgcacgccggtatggtgttcctgtccaatacctccgccgtgccgacagccgtgttgaaaccccggttgcgttcctgcgataaggcggcgacaaactccgcgttactcataggctgtgagagtgaagaaactacttgatgctccacctgtctgataggcattgccttgttcttcttccctttctgcacggtagttggctctgccctctgttccgccgatggctgtcctccgttctgaccgcccatgtactttgccgccagctcgtaggacttctccataagagccacctgctcgtccatagaggaagccttgcccctctcgctttccagttccgactccagcgatgcgatgcgctccaacaattcgtccatctccgcattgtcgtttttcggctggtcgtagaagtttccgagcgtggcgttcaggtcacggtaggcggctgcggaggactggatggtctgcggcgtggctggctttgccctttcttccttgccgcccggattggcgaggtcgaagtccactccgttctccgttcccgctatctcgcggtcgaacatgtcgcccagctgcccgatggcacggttgcggctctcctgacgctcttccatctccccatgctcgtaggctttcagcttgtcgccgataatctgccggttcgccttgtcagcgtcgggcatctcggtgttgtatccgtccgttcccggcggttgctccttgccggaggacggggcgaatatcagccacatcgccccgatgaacaccaacaccatagcgggcagcacgatcatcttctgccgtttcagccgttgcgcctctgtcagcggttcgcgctcctttttcggtttccccgtttcgggagcagctttgttctctttcgtcggttcattctttgtctgttccatataaataaggtgttaagtgattgcctgtttccgccggggtcggcagttccacccgtccggcgtgtcccgtttccatatgtgagccgtcgttcctgccgatgtcatagacggctctgccgaaggtgtaaagggcaagcaccgcgaaggcggcgaacatccccagcacgatgcggcggcgtgtttccggcggcaagccgtccagataccctttgagacttgccgccaagcgtttccgtttgtcgtggagtttccaatacatgccccacattgattttctgatacttttcatgtcctgttaccgtttgatagtctgtaaatccttgttctcaatgatggtgaaaccctcgatggtaaaaccgttcgggttgtcatccgaccgcgatgcgttcagcaggcggcaggtggtcacgaggctgcgctcggtgacgttgctctgccggatgattttctgtgtggcgtaggtcacggcacggtagggataggcgttgaagtcgcacaccacgctgtccaccttcagcacttggttgatgttcccggcgatgatgcggttgtagtaccccttctccgcgaagtccgaataatagtggtacacgctcttgtccgccagcagcaaggcacgtttcacgttgtgttcaatcgcgcttttttcaggtgatagcgtgaagaacatctcgtggaaacggcgcacatgttcccgtgcctccgccgggcggttctgcgacaaatcctgagacaaggcgagcatcaggctcttgccgttgtccagcacatagattttctcccgttgcttctctgcgaaacggtaggagttccacacgctccacaccgtcaccacggcgcacagcgagaggaagacgataccgaacaggcgtatctgcctgaacgacgattcgatgtttctaagtgatttgaattccatttatattttccaatttatgattgcacattgattatttcagcaatttgccgacacgtccgactgcgtttcctgcggctgcacccgccacgctgcccgccatgcttccggctcgtcccgccatctggttcacgttgcgaccgtaaccgcccatgcctccggcttggataatccagcccgcaacggtgggaatggtaaagtagccgatgatgccgatgcagaggaatacgatatacaccccgtcgctcgaatccagcgagaagttcgggtctgcctgcatccgctcgatgtcgttttgcagcatcagaacctgtatcttcgccagtatggtgctgaacatgtccgataccggtagccacagatagacctgtatatagcggcatatccactgcgtgagcgtgttttggaaaccgtcccataccgacagggcgaaggctatcggaccgagaatcgccagcaccacgagaaagaaggtgcggacggtgtctatcacgagggcggcggcttggaacagcagttcgagtatctcgcggaagaagtcgcggatgctcttcttcatgttgtacattccccggtcgatatacattcccgccatcgtcaccatgtcggagggcgaccagccgagttcctccagttgcttgtcaaattcctcgttggacacgaggtaggcggtttcggggttgcgtaccatcgcctcgtattccagtttgtccttctgctcccggtatcggttcatgtccagcgtttccgcctccagcatctttgccgtgccctgtacgacgggtgagaggatgctgtttatcgtgcccagcaccacagtcgggaagaacatgatgcacagaccgatggcaaaaggacggagcatcgggaatacgtctatcggttcagctctcgccagcgactgccatacccggtaggcgacgtagaacagcgcacccagcccggcgatgcctttcgccacaccagccatgtccccacacagcggcatcatctgctcataaagtgaacgtaaaatctgatgaaggttgtcgaacttcataggctaccagtatctttcgttcatgttcccgtacagccccatgatgcggtcgaggtcgttcttctttttcgcacgcaggtaactcacggagatgttcttgttcgtgtagtagctcacgaggttgcggtaacgcttcatcttcgagtggcagcgttccaccacgtccatgcgctccttgtcggtcatggagagcgtggtgatgttcaccacgttcctgagttccgtcaacacttcgttgctttcctccagcagtttcgtgtagccgaaagcgattgcggaaagctcttcgggtctgaaattcccgtcacggagcatccgttggaaactgttcacatagatgtctgtgatgtcgcccaccatcaggatggtctgctgcaccttgcgggcgtccttgaccagattgttcaccgatttgagggcatcgtaatacttcttgccctgctgatagattttcaccgtctcctgaaagttgctcaccatgttcgtggcggtcttggaggtatggatgatgtttttggaggcattgatgatgccctgcgctagattgcccggatcgcttacgacccactgtgcgcttgccctgcccgcgaaaagcaggcacaggcagataatcattgttattcttgttctcatgttactttggattttagtggttgttattcttcggtcggatgtcccggctgcggcttcacccgcacatagtccccgtttggcgagaaagtcagcacatccgtggcctcgttgtaggacacgtcgatgcggaagccggtgttcatgaacaggttgccgttctcctcctgcaagagataggtttccggcttgagcttgcggcgcagaccgctacgacggaacaccgtcactttgtaggcttcgccctccttgtagataagcacgtcaggttttccctccacgctctcccagttcccgcacagcatgtcgcggcggttgtcggccacgtcgcaggattgcagcatcatgaccgccaatccgataaggcacttgctgacttgcagcattttcacttttggtaaattcatacgcgtttttcttttttggttgatacattctgttttttagttattccttgtttctccgcctttcggcaagctgccggatggcggcttcgatgtcgtcgcccagcttctccgccagacggtaaacctccactttttccgtttcctcggtggtgtacgcgtaggctaagcacccagcgccttgtcatatttctatggtaggtttccgagtactcgcctccgaaccggacttacaagtctccctgtatccggctctccactaattaattcagtctgattcttcggtcggggtctatttttgcatgacactttgagcagacagccaaagtttttcgtcttcgagctatcattttcttttcccagtcggatttacctttcaggtctttaagtttgcgaacgtgatgcatttcgagtttatcggtagcaccgcataattcgcaaacttggagcttcagcctttccataaggctgttacgtccacctgttatggaaactgtccgtggaatagtgtcacagtaaatattccctgcaacctttttgcgtttgaaaccatcatgataaaatgattggtaaagtgtcttacccttgctattttcatatgccacttggaaaaccttgttctttttatatttcagaagtattttctttacagatgatttgtatttgttcgcaaataccttatacatgctgtatgacataatgtgatagaaagaattgatgacatagctgttattggctattgagtagtaattatagaaccctcggatttcggcattgaactgactgactatttccaagtcatccaagttcagcatgtacgttctgacgatggatttccaaacctctttgccattgacgaccgcgattcttgcggctttataatcaaagagtttcttccgcatcgtttcaaaattcaggtacaatacaggcttgtgtccgaatgcacgaaccgttttaccgtacttatccttacgtaaatcgttacacctacgtataaatacgtcatatccgagaaatttcgctggtttctgcgcattggttatcagtgtcttttcgtctgacagttccagtttaagagcttcattcaaataattcttaatatcctcttttactgttttgcagtcttcaagattaccggtaattccaatcagaaagtcatctgcgtatctcacgtattttaaccgtttgatactgctgtccatttcattacgtgccggatagttgttccgttcttctcgtagccgcttaatttcggcggtcatctgtttccttacctttacatctttctcattctttagtttctttgccagtcggtatcttcgctgttcgtagagcttgtatcgagcgtcgccttttcttgttacccctttattgaaccgattgatgtattccttgatgtacttgtcgaacttgtcaaggtagatgttagccagtattgggctgataatcccgccttgcggagttccactgtacgttctatgaaatacccagtcttccacatatccggcattcaggaattttctgataagccgcaaaaatctctcgtcggcgatacgttcccgaagaatattaatcagtacgtcatgattgatattgtcgaagaatcctttaatatcgccttcaataaaccatttcacggcagtgaatgtcttttgtatatctataagagcagtatgacaacttcgtttgggacgaaacccatgtgaagtatgttcaaaactaccttcatagattgcttcaagtatcattctgactacttcctgtaccagcttatcatcaaaagagggtatgccaagcggacgttttttcccgtttttcttaggtatgtacgtccttttggacggattaggctgataagtctcatttttaagactgccaatcagttgttcaactcggtcaatactcattccgtcaatggttttaccatcggctcctgccgtcatgttgcctgtcttgctgtaaatattctgataggctacataaaacatttcctcgttaaacagcactctatacagccgctcaaacttatagttcaagttaccgctgtgtttactcagactgttcaacacattttctggatttctcatgtctctcacatcttcctttaaattgttaaacttaattagctgctccccttcgccatgtacagggcgttaccctgctcagactactatggaagctccgttgccatgccagatattcaggggcagaccccatagccctacaactggctttccggtttaggcaatccccgtttagaaatttgacgactatttggctcgatagattgtcggatacgactttcgtcctttactacttatggtagttgccttgcggtaagtttatgctactcctgctacgtgtcatcagtgtagtaccgcaacataacggtataattccgaagaattattcaactgtcttccgtcattgcccaaggatacgactgctcggactatcgttcaaccaatgcaggctttatcctcatatctatcattttaacttgccattcggtcgcagcctgacagttggctgacttatggctttaccaacgtgctatgttcccttgtggggttttcccctccggttagcggttgttaatgggcattttaaacacttgcccagtcgcttgccaaagcgacattcgtcaaattccctttacgggcgcaccagatactcttccgcgctgacctccgtggcatagaccgccgactgcgtgccgcccaagcctatccacacctccttgtagagccgtgaagggttgttcgccatgttgatggagagtatctgcgacttctccttttccgtcagtccgagcaacgcctgtatctggtcgaacttgttcatatatttcctttggtcaagcaggattttacaatccgagttgttgataatgctctctttgaccaccggagaactgataatgtcgtccacctcctgcgtcaccacgattgcctcgccgtaatattttctgaccgtcttatacatatagcgcagatattcagccatgttcgccgatgagagggccttccaagcctcttccacgataagctgtttccgcacgcctttcagccgccgcatcttgttgatgaaggcttccatgatgatgatggtcacgacggggaacagttcgcggttttctttaatcgaatctatctcgaagacgatgaaccgcttgccgagcaggtcgatgttctccgtggagttgagcaggaaatcgtaacgcccgccccggtaatactgccgcatggtggtgagcatgttgtcgatgttgaagtcggacttctccaccttgatgtcacgctgtgccagttccttgcggtagtcgtcacgcatatactcgtagaaggtgttgaacgacggcacgatgctacggtcggattggatgcgctcaatataggcactcacggcactgcccagctcgccgctctccgtctttgtcaccttgtcgtcctccgacttccagagcgtcagcaacagggtcttgatgctgtccttcttctccacgtcgaagatgtaatcgtcggtgtagaacgggttgaagctgatgggcttatcttccgtgtaggtgaaatacacaccgtccgctccgcctgtcttgcgtcggatcatgccgcacaagccctgataggagtttcccgtgtccaccaataccacatgtgcgccttgctcataatattggcgcacgaggtggttcatgaagaaagacttgccgctgcccgaaggacccagcacgaacttgttgcggttggtcgtgatacctcgcttcatgggcaggtcggagatgtcaaggtgcagcggttttcccgtgagcctgtccaccatcttgatgccgaagggcgagagcgagctgcggtagttggtttcctctgtgaacaggcacaccgcctgttcgatgaaggtgtggaaactctcttccgccgggaagtccgccgcattgccgggtatcgccgcccagtagagtgtcgggcagtcgatggtgttgtggcgcggcacgcattccatgcttgccaactggctgcccacgtcgttcttgatatgcttcagttcctccgcatcgtcgctccacgccatgacgttgaagtgtgcccgtaccgaggtcagtccgtaggaatgggcttcgttcaggtattggtctatccactcgcggttgatgctgttgctccttgaatagcgagatagcgactgcatgttacgggcggacttctcgaacttctgcaaggtttcctcactgttgtctatcagcacatactggttgtagatatggttgcaggagagcagaagccccaccggggaggcgaatgacagtcggcagtcactccggtcggtggagagcttctcgtaacgggtgtcggtagccaccttgcccggcaggtcttccgcgtcggagagggtgtgcagacacaggcggttgtcgccgatgcgcatctcccttgccgaaagctcgatgtcctgcaaggtggtgtcaccttccggcatgagcgagaagtagcgttcaataagtcccgtctttccctcagtacccacaatctcatcggtggagaggcggcgcagcctgacaagcccgctgtcgttcatgatgcgctcgaactgttcgcaggcttccaagaacttggtcgtggtttccctgtccagctccttcgggatgatatgtccccggcacagcgtgctgaaattgctctgcatccggttacgctcctttgttgtcttggtcaggtagaggtagcaggtgtgtttcaggtacggacgctcgttgaagtgacgctcgaaagagcggcttaaaaagctcatgtcgtccttctgaagctccggtttgtagcgttccttgatgaaccagtcctgtttgtggacgacggagtagtccggcagcaccttgatagccttgcaccagcaactgtgtatcgcctcgtactccgcacccgtcacggtgtaaagttccggtagttccacctcgaaagccaccgtgatgtcggcgtcctttgagatgatgcagccatgctccaccgctaaaagtgggaacctgttttccagtgttgtcattttcgatgtattcctcattgtctttcttcctttcgttgtcgtttgaacagacgggttatccgccgccggttgataaggtatcggggatggctccgtgccgctcctaatttcatcagcccgtgttcaccgtaccgggcgttcagcgcgaaggtctgccatacaaggagggaggacgatgccgcgccgaagccgatacatatccactggtcgataccgaccatgtagaggatgacgaacaggacgaagagagccagcagacctccgcagaagatgaagaggtactgtgccttcaagcccttgaactctaccggacggccgatacccttgttgattgggtattcagccatacattatttattaaaggaagaatgagcgcaggatggtggcggcaacaatcaggaagatgcacgcgccgaaccacgaggcggctgtcttgctggtgtcggggtcgcccgatgaaaacttgccgtacacttttacgcccccgataagcccgacgactgcaccgatggcgtatatcagtttagttccggggtcgaaataagaactcaccatagaggtggcttcgttgatgcccgcgatgccgtttccctgcgcgaaagcggaggcggttgcggcgatgacaagtgccgcggagaggattgcttttctgtttttcaagatgttcttgttcataaactgttcttgttttttgccgtcaaaagggtggatggtcctttgtcgggcggttgatactttgtttctttactttggttttagtggatgcccgtttgtttccacggacgtgggcgtgtccgttgcggatggggatgcgccttgcgtttcctcgccgcgtgggttgatgtcattctttcatgttcatttcttttattgttgtcatacatagttgcgaatgtcgaactcctcgatgttgtccggcacgacgaactccttttcagatttcttcagccgaatctcgataagccccttgatgcggatgcctatctccgaagagccttccatcattttctcgtacaactccgtgccctccatgtcggtgaacaccttagccgccttttcacgttccgcctgtgtcgcgtccgggtttttggcggtcttgcaggcgtcgtcaatctcgtcaaagctgctgcccgaagcccgtggcgtgtccgaggcgtcctcttccggttcgtcgtccccgtatcccagttcctccggcggtatgctcgtgaaggtctcatcgagtttttcctccgggacttgtgccgggcgggatgcgtttcccgtttttccgtcgtcaaaagtagcctcttcctccgacagctcaatgcctttttcaatagtggcggcttcttgcgtcggtatggcagcggttgtccgggtggatgccatcctgaaacggctcttgccgatgatgtccgccttttccgcagggacttcctcgtgtgccgctatgcgtttagcctcattcccgtccagtgaccgccataatccgacaatgcccttgaagaagcggacaatccgcgtgtccatgatgcgctcgtaaaggagcaggaacaggaaccagaggttgcagccgaccgataccgccagcagaatgtctgtcatgctgattgtgtaattcatatccttccgtttttggttagaatactgaattgtaatttcgggcataaaggctctttatcgcatcttcgcactggttgaagtggtgcgtcagcacatggtcgatgtaagcggacagcgtaagccggtcatgcccgattacacgggtgatacgcatgatacgctcgtggtactccgggcgcacatacgccatcttcccctcacgtgcctttacttccgggtcgcggatgaacaggcgttcatagtccttctcactgcatttgccgcttaccgggacaggcgacagtatttccacactcgcctgcacttgggtaaacatacctccgcagtcttgctgtggtcttttttcattcggtgtcatttctttttccattttcaaatcagatcttcacgttgtttcttgtacagttcgttgattctctccttgtgctgttccagatgctggcgcagcacggtatccacatatccgcctactgagatttcccctccggcgatgtcgttcacgattctgaggatcttgccgtggacgtcacggctgatatagacacattggcgggtctttatctcgttgcggcgcaggaatagctcgttgtagtcctcgtcctgccttttccggcgtccactttccctctgcgctttttcccgtgttacgggttgcacaggagatggttccggtgcggcggtgtcctcttcggtcggtgcagctgcgggtacttcctgtgcggggcgcagtgtcccgtcctgtgtgcgccgcccgatggaggctaacagcagttcctcgtcgatgccttccgtgttcactttcctgctgcccatgctcactgcggtctgatgatgtcgcttatctcttcggaaaactcccggatgccactccctttcagcagtgccgtgtccatcgggaagatggtggagcggaaaacgctcttgcgctcttccgaaaggtcacggcggaacttcttgctgtcgggcaagcgggtggaaagtaccggaaagcccatttcggctatcacttcctcgtagatgccgtacaagtcgttcctctccctgccgtccaccatcgtccagaacagatgcagcccctttgttttcgcctgtccggtagtcatcagcctgtcgcggaacatcgtgacgaatttcagggtactctccacgacaaagcggtcggcactcagcggagtgaaaatgtagtccatctgcgagagcgtctttatcacgccgttgcttcggagtgtgccgggcatgtcgaagaacaccacgtcgggtttcacgtcctcagtggcaatcatcctctcggcatcgtcgagggcgttcaccgcattgcttttgacgatggtgtaggcgttctttttgatccggcggaaatggtcgcaagcgagagccttgaagtaggtgctgctgtcgataagccccatttcgtgttcgcgcagcccgtggatgctgtgctgcgggtcgtcgcagtccacgacggcgacattgtagcctttcacgttgtgcaggtagctggcggcaagtgccgtgacagtggatttgccgatgccacctttctgtgttgcgaatgcaacgaagatttccttactcatagttccatttattttaattgttgatgatttgtttttctgtttccatacggatttggctgtcgcaccatccgcttccgtgactacacacgcaggcgggtcgtcgcgtatccggttctgtggtgaagcggtgcgtcggacaaatggtgattgacgacattgcgtcatgaagtcattgaatccatacgtcaccgaattgtcggagaaccgggtttccgacggttcgggtatccgtttcggcaagtatccgaagaagcggatttccgggtatttgaatgttccgtttatcatatcttcaaatcgttcgtttcttgaatcatgctgcaaataaacaagtatattttggaacctgtatcacttctccggcaagtggcggcacgttgcgccggttggcagtcattgaccgggtcaagcatctgtccgataccgctttaagggcgtaactttgcacccggacagcagggttcgccgatgacgcgcggcccggagtcctgaaaggtattttcccaatccgtcccctgacggatttttatgttcacctgaacatagcaagatgtcttttcagccgctcaaaatattttgagcagccacgaaaagcacttgcccttgcagggggcgggctttccctccgaagtcgggaagcctttcagaactgcggtgctgtaatccgaagcggcggcttatgccgtcaatccgctaaatccaaagtaatatgaaagagaaaaggaaaagcaaatcagggagaaatcccaaacttgatccggcggtgtaccggtacaccgtccgtttcaacgaggaggaacacaaccgtttcctcgccatgttcggaaaatcgggtgtctatgcacggtctgttttcctcaaagcgcacttcttcgggcaaccgttcaaggtgctgaaggtggacaagacgttggtggactattacaccaaactgtcggattttcatgcacaattccgtgccgtgggtacgaattacaaccaagtcgtgaaggaactgaggctgcatttttcagagaaaaaggcgatggcgttgctctacaaattagagcaacacaccgtcgaactcgtgaaactgagccgccggattgtggaactttcaagggaaatggaggcaaaatggtcgcaaaaatcagtgtaggaagttcgttgtacggcgcgattgcctacaacggggagaagattaacgaggcgcaggggcggcttctcaccaccaaccgcatctacaatgacggttcgggaacggtggacataggcaaggcgatggagggttttctcaccttcctgccaccgcagatgaagatcgagaagccggtggtgcatatctctctcaacccgcacccggaggatgtgctgaccgatattgagttgcagaatatcgcccgcgagtatctggaaaaactcggtttcggaaaccagccttatcttgtattcaagcacgaggacatcgaccgccaccacctgcacatcgtgacggtcaacgtggacgagaacgggaaaaggctcaaccgggattttctctaccgccgcagcgaccgtatccgcagggaactggaacagaagtacggattgcatccggcagaacgtaaaaatcagagattggataatccgttgcgcaaggtggccgcatcggcaggtgatgtgaagaagcaggtaggcaacaccgtgaaggctctgaatgggcagtaccgtttccagacgatgggcgaataccgtgcgctcctttccttatataatatgacggtggaggaagcgaggggcaacgtgcgcggacgggagtatcacgggctggtctattccgtcacggacgacaagggtaacaaggtgggcaacccgttcaaatcctcgcttttcgggaagtccgcaggctatgaagccgtacagaagaagtttgtccgttccaaatcggaaatcaaggataggaaactggcagacatgacgaaacgcaccgtcctttccgtgctgcaaggcacttatgacaaggacaaatttgtatcccaactcaaagagaagggcatcgacaccgtactgcgctacacagaggaagggcgcatctatggggctaccttcatcgaccaccgcacgggatgcgtgctgaacggttcgcgcatgggtaaggagctttcggcgaatgccttgcaggaacacttcaccctgccatacgccggacaaccgccgataccgctatccatccctgtggatgctgcggacaaggcacacgggcagaccgcctacgacagtgaagatatatcgggcggtatgggcttgctcactcccgaaggtccggcggtagatgccgaggaagaggctttcatccgggcgatgaagcgcaaaaagaagaaaaaacgcaagggcttgggtatgtaatcagagtatcaacaattaaaaaatcaatgtatgtcacaacaagaagacgatttgagggcattggcgaaaatcatggattttctgcgtgccgtgagtatcattttagtggtcatgaacgtgtactggttctgctacgaagccatccggctgtggggcgtgaacatcggcgtggtggacaaaatccttctgaacttcgaccgcacggcggggctgttccattccattctctacacgaagctgttttccgtccttttgcttgccttgtcctgtctgggtacgaagggtgtcaagggtgagaaaatcacttgggggagaatctggacagcatttgccgtcgggttcgtgctgtttttcctgaactggtggttgctgcccctgccgctgccgcttgaagcggtgacgggactgtatgtccttaccattggaacgggctatgtctgcctgttgatgggtggtctgtggatgagccgcctgttgaaacacaatttgatggaggatgttttcaacaacgagaacgagagtttcatgcaggaaacgaggcttatcgaaagcgagtattcggtcaatctgccgacacgtttctattacaggaaacgctggaacaacggttggatcaatgtagttaatcccttccgtgcgtccatcgtgttgggtacgccgggcagcggcaagtcctatgccgtggtaaacaattttatcaagcaacagattgaaaagggctttagtcaatacatctacgatttcaagtatcccgacctatctactattgcctacaaccatttgctgaaccacccggacggctacaaggtaaagccgaagttctatgtgatcaacttcgacgacccgcgacgctctcatcggtgcaatcccattcacccggattttatggaagatattacggatgcctatgagagtgcctacacaataatgctcaacctcaataaaacgtgggtgcaaaagcagggcgacttcttcgtggagtcacctatcattctgtttgccagtattatctggtatctcaaaatctatcagaacgggaagttttgcacgtttccccatgctatcgagtttctgaaccgccgttacgaggatatatttccgatactgacctcttatccggagctggagaactacctttcgccgttcatggatgcgtggcttggaggggctgcggagcagctcatgggtcagatagcgtcggcaaaaatcccgctttcgaggatgatttcaccgcagctctactgggtgatgtcagacagcgagtttacgctggacatcaacaatcccgaagagccgaaaatcctctgcgtgggtaacaatcccgaccgtcagaatatctacggtgcggcactcggtctgtataattcccgtatcgtgaagctcatcaacaagaaggggatgctgaagtcatcggtcatcatcgacgagttgcccacaatatacttcaaagggttggacaatcttatagctaccgcccgaagcaacaaggttgccgtgtgtctgggctttcaggatttcagccagttagtgcgtgactacggggacaaagaggcgaaagtggtgatgaacactgtcggcaatattttctccggtcaggtggtgggggaaacagccaagacgctctccgagcggttcggtaaggtgttgcagaaacggcagtccatctccatcaaccggcaggatgtttccacctccatcaacacgcagatggacgcgctcattccaccgagtaagatttccgggcttacgcagggaatgtttgtcggttctgtatccgacaacttcaacgagcgtatcgagcagaagatttttcattgcgagattgtggtggatgccgaaaaggtgaaacgggaagaaagtgcctacaagaaaattcccgtcattacaaacttcacggacgaggacggcaacgaccgcatgaaggaaacggtgcaggcgaactaccggcgcatcaaggaagaggtgaagcagattgtgcaggaggaactggagcgtatcaaaaacgatccggtgctgtgtaaactgctaccagataatgagactgtctaacaagtccccaaaattgaaaattatccctatcgaagtttgaagtgacccccaaaagttggatacaatttttttggggggcacttcagttctgacgggtaaaatcgtaaaattcggacttgttagacaaatacttacgcggtttcaacctcaggtactgaatctatcgaattgacaaatttaaccaattgcggatctgaatctttttgtatgaggtttcggagactctttttcaattcataagcatcatcccctgctgtatttattaaatccatataaaaatctttgttttgcagaatcaatgaacggcatgccccatcggaaattacaggtttcactattttatcaataacgtctccagcttgacttttcaaattaccatgcgatctaagccatgtttcgaaaaattgaaactttattgcattgatagtctttttaccgatgcagaaatcatttcttatatcggtaactgtcgatttaatttttcgtttatccaatctttcaactatattcttgaaacaattagggaaaggattcaaactttgagttccagaagcaatatccatcagaatctttttgccaaattcagtcaagttatctggcaaggatttgattttagccagtaaatgttttattgcgacaaaccaataatatgatgtatgtgctgttctttgggcgtataatgtatcaacacttatttcagacaacgcttcgaacgctattttattgatatgatcggtcaggacattgcttattttagtggtcaaatcgtaaaaagatgcgtcaggaattacatctttaatattgttcttagtgatatacttatccaaatcggtattccactctgctaaatgctcgataaatacctcatccgttacacctattctgttcttaatatcttcaaattggggcaatatgtctgagagcaataatttatagccaagtttatgatttaccatgtattgtagtgtttcatttaatagcggtatattccatcccacactatttactaataagtctccatgatccacataatagtccatgagttctgcaacatattttatatctccaccctctattaaggaaacggaatgaccatgtgccaattgcatggcgactaaatcgtaatatccagactctttaatgtttcggccatcagtttctaattcagaatgcaactgatttatgtaggttgaatctaacgttacaggtaaaggtctttcttcgtcagatgccaataaacgataggttgtaaatatagcccctatattatctttatttacattctgttcatcaatgcaattcgtgatcgcttgcaaaagcgttggaaacgtataggtagaattatcttttaacgtttttacaatatctgcatggtcgaaattatcgggtagtaagtttgccaaataattatcgagcgcctccgaatttgttgctacttgataatatttatatgctttagttgtcgcgttatcccgataggcagcatctgttgcatttgcagcttgaatataatcgataaatgtatttggcttgactgtttttgcttcaatcaatgacgtaaaatcgcacgccaacttattttgcgcaataaacctgtctattgcatctaacgttttgaaatagtcgccgccattgaagtcattgaaccgaactatcttcttatataattgagcaatcacatggttttggctttccgtgtctaaatgcaacagcagttcttggtattcgacagggaacacctgcttctctatggattcttttaatttcaattgtgctattctttgccatacacgcagaataacatcgctctttcgagttaatttatgcaaacaatgtataatcttatcgataagcgcattgtccatacattgtataacttcttctaatacagtgtcaaattgtttattagtctctgcatattgatttatgtcgtggtcttcttctccgttgatgcagccttcaatatattttttcaatggaatttgtcgagcatcttcaacatcgacaccatataccaaagctgcaatttcgcgttgtgtttgcagatcattgttaattattgtttgaatgccattcagatagtcgccggacaatatttgttctactggatttgccagaatatccgtcttcttcaaacagaacaatgctatgtttatcatcaaaatttcgttacaccactcttgtttaagagcgaccatctcattgatatatgatataatttccctaacattggcattaggatttaccaatctgaatatccgatttatagtttctttcgcttcattttctgtttctccaaatgcttcaacaaacagtttgttgaatatacttcgatagtcggtaataacaggaggagcaacacgataaacaatagggaaagttttattgataaaatacttggtcagttgtttcgtttgttcgtcggtctcatctccgaatgcacaagctaaatgtgtttcatcgaaaggaataacagcccaaacattttcaaaaccgctatcggcgaagaacgtatggatagaagaccataattcttttactttttcagcggggagacgatccatgttgtcaaaaacaaggactaatttacgttgtcctttttccttgataaaatcagaaatgtcttgcatccatgttttgaactcgtaaaccgttggttcgtcttcgctcaaagtctcatagcaaacgtccttttcgactttatcttgataaatagctaacatataactccatccatatttatgatctttgctatatgcccatttccaaacgcacaatgcaataagaactggcagtgcagctatgataatagacaataaagaaaaccaccatgttgtgggtgtaggttttactgcatacgcaataaatgtaaatatcggagttaaaactgcaaccaaaaatgccgcaaccataccattactgataaggggatatttttcggttacggtctccgttttacgggctaataaatatttcagcttttcagaccatgatacggttttcgtacctccacctttgacttttattgttgcatttccagataggataccatcatcaataagtttgcttgtaagcaattccaatatagagcggcgttgcaagtcctcttgatgtccccatgcgtcatactcaaaaaagtaatagtcgtctgataattcacgttccaacattttaaccacgttggattttccagatccccaaataccttcgatgccgataattcgaggtaaagtacattcctcatccaatgaatcattctgacaaaaatggcgagcaatagtttttgccaacctttcttgcgaacctccatcgaatttgtcaataccacacggtttattttggataaaccgcggatattgctgtttggattgtagttttgtttccatatacgtaatttattgattatacgaactccaaataattctcccgatttaccacatgaaactcggcatagggataggcttcttggaaggctttcggtgcggccggcattttatttccccacttgaactccaaggcggtaagactgtcggcactctcctcaatcaggtcgatttcctgtttgtcgtaggtgcgccagaaatagaactccctgtgcagtccctcattgaagttcgctttgcgccgctctccgatgatgtagttctcccacagcgcaccgacatcctgccgaatggccagcggtgagaaagccccgataatggcattgcgaatgccgttgtcgtagaagtaccacttgccagcttttgtaacctccttgcgtaggttacgcgaataagcccccagacgatagataacgaagaccttttccaataggtcgaggtatttttcaacggtcgtcttgctcatgccgagttgtttacctaactcttcgtaagaaacttcgctgcccaactgaaaagctatcaatcgcagtagatcgcgcatcttgctcgaattttttaagccgtcaattgctaagatatctttaagcaggtatgcaccgacaatatcacgtaggtagtctgttttacgttcatagttctccatcattactacttcgggataggaaccgtaaatcaagcgcgcttcgaggttctggcgggtttcaagtgccgtttccgtctgtgcgatttcccgttgcgagaatggtgtaaggagaaattgcgtactgcggccgaccaacggttcaccagtcttattcagcaaatcgaatgacgaagaaccacttgccaagacacttattcccggtatttcatcaactatcaacttcagaatactaccgatttgtggtatgttctgtgcctcatcaatagccagcaaatcaataccatccaataaatgccgataattggctattgagcgattctccaatagtgctaatgtgtcgtagtcttcgccgttgagcatcatcgtcctacctgaatagttgtccacaattttacgcatcattaccgttttaccaacacggcgagcaccaaaaatcagtactgctttattgggcgcgattcgtgctgtaatcttctcttgaagtattctatttactgtttccataccttataaaatataatgcaaagataatcatatttttttaattggcgaattttacaaaaaaaacgggctattaaatggcgatttttacaaccacaatcttatggaagttgtttcattgtttttagtaatgatatatgttcatactatgatgactcaataatttaccagacatacgtttctgaaatttgtccttataggaatgaaaaactcacatatattgtgctaattaatatataattaaatgaaaataaaaagacaggatacgagtattcctgtcttctcatatgtaatggatatttttttattttctcatccgctccaactcctcatcacgcaacattctctcgttcagtttttcctgcatcctgtcaatgaaataggtgcggctttcgttcttccggcgtttgatatcagtgtagaagcggtagcagtctttagaatcaaccccgaatatcttatagagaagtggggcgagctgtttgagcggcatattgccgttgttgatgcagcccatcacgtctatgccgtagataagttccacgaggtcgatggcattgcccgtccattgaagaaggctggcggtggtttctgttgcgttgttggcggatattagtggtggcacttggggcgtggcaaggaatttctgcatctttcttacgaaagacagagccttgctgacgtaggcggcaatctctcttttttcttctgacagattacgtacgggatggtgctgcaactcgatttcgatgtaggcaagcgcgatgacggtaaggttcatgtccatgccgccgttgcacagttcgatcacttgggtggcgaaagccgtgtatgccgtttccatattgcagtcgccggcttcgtttatcaggcggaaaaagtcggtttccgccagcaagaaataattcatggttctgtcaattttgaaaattacactttgttttctgcgtgcgcacatgaatataattggcaaaaaacgcggcagaaaataaaaaatccaacactcaattttacaaagtgctggatttcagaggtataaaattcagtattttttcacaaggacaaattatctccgacttaaattgtttgtaatcggaacatttattctattcctgaaaatagaaatgtatgcttgccgcacattttggctatcttgcttttttatcaaggatatagataatgcgacatacaccgttgggatagcttttcaaagaggaaagcgtccagtgttgctctggcagagccgacttaaaaaaatgtcgtccgcttccggatatgaaaggaacggtgtatagtatgatttcatccacagcgtgcatccgcagcagtccgtttatatagtctgccgtgtccggtgtggcttccgcgaggtaacggatgtttgtgcagtcttttctccattcgtgcagcattgaaatggaatagtccggtgtcacacggtaaaaggctttcttcctgatttcatcaagaccgcaacggtcaaggcacaaatcctgatgtgctttatcatataactctgaagaaagacatccgtccatcgtcagtacggcgagaatctgaactttacccataatcgtttcctttcgttaggcaagggtaaaaaagtagcgtgcaattcacactaccttcaagcgatggctctggtaaagcctttacggagagtacgtgaatgcacgctatgcgtaagcatagcataagcatcacgcaatcgtctccgtagttccaatttaccagattttcgcttgaaacgccttgcggtcttatcctatatgttggcggcgaaaagctcctgccaatcgccgtttttctcaaatgttatgcaaagatagccaaattcagtgaattacgggctatgattgcttgaatttatatttaagtccatactcttcaagtttgctgtatagtgttgtcctgcctatgccgagcagttctgcggcgacactccggttgccgtttgcctgtttcaacgcacgcaatatccgctccttatcctccgcgtcattgcgcaaggcgaagctgacagtagaggtcggtttcgtcacggcaagttccagatgctctttcatgacaacaccttcctgcgcctgcaatacagcacccataactttctgccgaagttcccgcacgttgcccggccatgcgtgtgtcagcaacgctttacgtgcttcggaactgaacccgctcacgctacactccagctctctgtttgccatatcacggaagaactctgccagcggcataatgtcttcttgacagtcacgcaacggaggaacggttatcccgaagtcgtgcaggcggtacagaagatcctgccgaaaacgcttttcattcaccgatacctccaaatcttcattggtagcagcgatgatgcggacattgaaattccggtctgccttgtctccgaccgggcgataccgcctctcctgtatggcacggagcaacatctgttgggtttccaacgcgaggtttcctacctcgtccagaaacaacgtgccgccttccgcctcatggaaatatcctttcttggcattgtccgcacctgtaaatgcacctttgacgtgtccgaagaaagccgacggtgcaagctctttggagagtgaaccgcagtccaccgccacaaatggcttgcctgcacgtttgctcttgtcatgcaacaggtgggcaatatgctccttgcccgtgccgttctcaccaaatatcatcacgctcatatcggtggcggctaccagccttatgcggtgcatgattttctgaaaggcggaaccttcacgggcgaatataggcatacggcgttgtcctgcctgacgttctttcagtatggaacggatcagggggacaagtttatcctccacaagctgtttgggaatatagtctatcgagccgagtttcatgctttccacggcggtattaacttcggcgtagtcggtcataatgatgaagggctgcatctttccctcctttcgcatccagcacaaaaggtctatgccactgccgtcaggcagacgcaggtcggcaaccacgatatcattatctgttgcctgttgcagatgtttcttcgcggttgagaggtggtaagccttcatattgcggtagccctcccgtgacagcatattgcagacatattcgcaatacacgatgttgtcttccaccacaattatttttgtcttattcatcttcgtattttctcctttcctcttctgccaaccgtatttttccactcccttatccagcacggcagtcacggcatggcttaacgcttcaccatccgggagagcatcgccacgaagcaatccgtaaagtacattcagcggttggtcggcacggagcacctcccacgaactgcgcaggtggtggatcagggaatccagcttttgcaggtctttttcttttgctgcatcccgtaccgcctgcatttccttttctgtttcagttatcaacttttccagcatgacggcttcattgccataggacaataaggcggaaaagtccggtttcccgtccggtgtcgcttttatggcacacctgtcggaaacctccatcagttccgatatggagaacggtttgaacaggcatccggcaaagccttttgccaatagttcccctttgttacaactgcccgaagcggttgccacaaccaccgggattgttggtgaattgcccacgttggacgaacgcaacagttccagcaattcgaaaccgtttatatcgggcatattcaagtctgtcagcaacaggctgtattctttctggcgtatcatttccatcagtgccgcagcatcggtgcaagtgtcgcagtgtattccttcttgggaatacatctctttcagcatcagaagtaatacctcatcattgtcaatggcgacaacatcatggaatttattgttatgataaacaggtgtattgcttgtatatccaagctgttcttcagcttcctgcatagaaatttcaactgtgaaacgactgcctttccctttcttgctgtctaaacggattgttccgccaagcatcgacacaatattacgcattatggcaagcccaagcccgaaaccctcctttgcggcggcatttgatagacgttcaaacgcaccgaacgcttgtttctgttcctcttctgtcatgcctgtacctgtatcttcaacgaccagtgtcagaactccattatcatattcagtaatcaaagaaacaccgccttcttctgtgaacttgacagcgtttgacagcaggttattcccgatttgtattattcgctctttgtcggtcaatacaatggcatcgtgtccagtcttcacggacaaggacagccctttgttcacggcaacaggcatgaactccgtttcaagtgtgtgcgtgattgctgaaatccggcagggtgacagacggggctgttccttgccgttgtccaggcggaagaagtcaagcaaagtgttaagcatatcccgcatacggtcggaggattgcagtatgttttggatatactgcccggacttatcctcacactgttctttccgtatcagtccggcatagcctgttattgctgtcagcggtgtgcgcagttcatgggtgatagtatgtaccgccttcttccttgacgttatcagtgcctcgttccgttgtacggattgttccagttgccttatcaaatcagttgtcttgtgcttgtattgtttaatgctttttgcatcacgatgtatgatgatgtaggaaattaacaacaatagaagaacgaatcccattaaaccgcctacttgcataaatgacttttcacgcatggcaactatttcgttttcccggctttgcagttcggtttgtaccttttcttctatttggcaaatcaattcttgcagttgtctgttaagttctgcattacgagctgcaaggctgtcggcttgttccgacaattggcgatcctgcactttctgttcgctgattacgtttctattgaccgaatgaaggatagtggttgatactgctggagttacttccttttttttgccgaatatgcctaagaaaccttttcgttttggctttttggactgttcctgcacacttttctgtacaataaccggaatttgattggctatcttcttgttaatagattgttgttcatccattaaccggactatctggaacatctgtcgttccttatcctctaaaagactgcgcacactatcgatgcgctctgctggataggtggccttgaaacggcagagcatactgtccattgccatacgccgtgcatggtaatgctcgatatctttatcgttccattccagtattgtttcacccaatagagaaaattttatcatttgaatattgatattgtttatttcttttcggagctcgtctatttttttattgccaagttctaatgcttctatctcctgccattcatagaggctattatatgccatacatccgataagaatggagataagtatatatcccaaccgtattgccttatagaaatttcctgaccgctccattattttaatgacattgatttttggaacatgaataaaagtttatctttttcgttcatgcggatattatcagaataaccgtcttttgttatttgatacccacatggcttaaccataaaaatgcctaagcccttagtgtacgaacttacttctgaggcatagtctttacttgtatttaatggaactttccctttaatatgacaccactcattattacaactgatgtcttcaatctcagacatcagtttttgcaaatctgtaatagctttggaactcgctacttggggtatctgcaactcaaaacagagcatcggttcgagaatgtccacacctgactgttgcaaagccagcctgaagacataaggggtcagctgtctgaaatcagcaggtgtacttaccgggctataatactcggcttgagtaaaagttactttcagatctgtcacttcccatccatgtaaaccagattggcaagacatacgaatcccttcaaaaacggcattttgaaaagaatggttcagataaccataggagatgtcactttcgatttgcaaccctgcccctaacggtaagggttcaagagtcagccctattgtggcccagtaagggttgggtggtacttcgatctgaataatcttattgaccttttttataggtcgttctttgtagatagtcttgatctcatcaaaatggacctttacggaaaatcgttcttccagcaatgtctgtatgatttccttttgggtcaaaccatataacgagatttccaattcatcactatatgagtttatggaaaaggacaaagacgggtcttcaatccacaatgtattcagagcggatatcaccttgcttctctcttcgggcttatttggccggacggaggatttgagagcgggatgctgatgagataatccttgaatcaaacaaggtttagcacctaaataatctccgattcgaaaatcttctatatcttctacaatcgcgatatcattggcacccacttcatcaacatttatctctctgccctgataaatagtctttagatttttaatcttgatgaatttttccgaatcgttgattcttacaacgtctcgaagtctcagacttccgtcaattattttaagaaaacttcttttatgccctttggggtcatgctctatcttatagagataagctgaaagtctgtttgagactgatgccggaggaagtataaaagaagaaatggcgtccaacaactcattgataccgatattgaacattgctgatccatgtagcaccggatagactttggcttttgccacaagagcgattatcgtattccaataatcagccggtgaaatttcgctatccgccaaatatcgttctaatatatcgtcgtcatggttgcatacaaattctttgtattcttcctttatatatgtttgggagcaaaccggataaaccgatccatcgacaacagtttgcataaacaggacatcttgcgacagatttgtttttatatccatatacaaacgctccaaattcacaccggcacggtcaatcttattgataaatataattgtcgggatttgcagcttttgtaaagtactgaacagcaactttgtctgcgcttgtatgccttcctttgcggataagatgaggactgctccatcaagcattttgaatgtccgctccacttccgcaataaaatccatgtgtcccggagtgtcaatgatattgcatttcactccattccagataatagatgtcgtagaagcccggacagtaattcctctacgtttctctatatccatagagtccgttatggtgtcaccattatccacacggccgcacttttccgttgctccactggcaaacagcagattctcggttacggaagtttttcctgcatcaatgtgagcaagaattcctaaatttataatattcatttggattaagcaataatatactacagtagatgcattgtcgaaacgcaccttttaatacctcctcgtagcatatgagaactacaggattactaactcgtattaatatgtatattattactgccgcataacgattacaaaattacacaaaaaaatatatctaacaaaagtgggaggattttttaactttttaccatagacattttattagggaagcgtaggttcaactggcaagtacaaataagtagaaatgtttgaacaacaccgttttaggaagttgaaaaatcaagtttctctctcggtatagcgtttattttggccaatatcttctttagtttagcatttgtgtatttcccattcgtgttctatttagctccttattatgagtatgtagcaagttacttatcaaattcagcctctttgagggtcaaatatggttttgcaaatggtgactgacaagacataaacaaggtcagcaggaattttttacataaatggacatgaatgtatataacctaaaataagaataaattttaataagggctgcccaaaaagaaaaaaatgcagttgccatcctatagatacttgcagaaaggataaaatttacttttagaccttttgggatagcccttattaatacttcagataaaattccttaggttatattttcaatcctttggaccgggtttcctccttggcatacagtcccggacgcccgattatgacatggttggcaacgatactatccgccggactgcgtatctgcggcggtgcattttcgggatattgcgcctgcctgttcctcacatcttccgcttccggcttgagctgttgcccttcattctccttttctgcgacttcgggcgtgggtggcgcaagctccagctgaatttttcggtcaagggcggcaagttcggacttcaactgcttcagctcgtcctccttcttccacaccttacccgctatctcctgtaactgcggtatctccatctccagcacctcgttcttcgccttgtactggtcgatgatggagggtatcctctccatcgcgttgaggaagttgcgggcggcggccaacgggtcagccatcgccagatgcccgttgttgtaggtgtacttgtagttcccctcgaccacgaagcggttgtcggtgaactccaatccctctttgagtatcctttcgctcaccacctttatcggaaaaccgtaaagttcaccgacctgcgtgtacaaccctccggtcgtggcattcttggctatctcctgcaaacgctttccgatgaccttctcatcggcggaatccactccgtccacctttattatattaaggcggttgccctccttgtcggtctgcaccaccgacaggaagcggttccagtcctccgtcatggcatctatgaaagccgtgttgttgcgcaactcgccggtctttgactccagcttgaactccgaatcacgcttgcccttgttgaacgacttgcgttccccttcgagcgatgcgatccgcttttccagtttcgccttgtccaacaggtcggtattgccggagagcaacgccatgtattccgagaaattcatgcccgatttttcgtccattgccccctcgtcgatggtacgcgcacccatcgcaccgcttttgagctggcttatgaaagtctgcttgcagtgcaggaggttgaacttgtagctgtccagtgacttctccaccgcgtagatgattacatccacgttgttcccggcgaaatgtttggcaatctcattacctgccctaactccgcgtccgtcacgctgttgcaagtcggacggtcgccacggcgtatcgagatgatggatagccacacaccgtttctgggcgttcacacccgttccgagcatagaggtagagccgaacagcacacgcaccgtcccggcgttcatggcgtctatcaccgccttccgcgccttgtcggtcttgcactcctgaatgaagcgcacctcgcttggcggtataccgtagtcctccgtcagtttgcgcttgatttccgaatagacgttccacccgtcgcccggctggtatgtccccaaatcagagaaaacgaactgcgtgcctttctgggcgtcgtatttttgataatactccgcgatcatcttggcacagtgactcgctttgttgtcgggatgatcttcgtaattcgggtctatcatgcgcatgtcgagtgccattttccgggcatagtccgtggcgatgagcatcttcgccttttcttccgtttccgaaagcggcagcctgcccaacaaggtggcatcgcccgtcttggcgaactgcatcagtttctgtatgaagtcctcctgttccggcgtgggcggtatatggtgcagtatctcgttcttggcaggacggtcaacgcccacatcctccgccgtgcggtagtccgtgatttcattatagaaggcggcaagctccggcactttgatgaagtagcggaaacgctccttctggaccacattgttcgtcacgttaaattcaaaatccgtcgtcttcttggcaaatatcgccgcccaagcgtcgaaacaccttatgtcctgccgttccagctccttcgggcgcaggtacttgaacagcaggtacaattcagtcagtgagttgctgatagtcgtgccggagaggaaggtcgcacccaagtcttttcctgtgcgctcctgtatggtgcgtatggcaaagagcatgttaagtgccttctggcttccctcgctgtttcccaatcccgccacacggtcgtggcgcgtgttgaaagtcagattcttgaactggtggctctcatctatgaagatgtggtcgatgcccatctgcttgaaatccaccacgtcgtccgtgcgtgactttatggcgtgttccaccttctccagcttcgcttcaaggttgtgcttgcgcttctccaatcctttcagcatcgcccgcgacacgttctttccctgctgccgtagcacttcgaggttttcctccaccgtgtcaagctctgcttgcaggatgcgctgctgcaattccggcgactgcggtatcttgccgaactggtcgtgcgacatgatgacgcaatcgtagtcgttgttctttatattattgaagaagcgcacacggttggcggtcgaaaagtccttctccgaagcgtacagaatacgtgcgttgggatatgccgcctgataggtggctgcaatctccgcaacgttggctttcagcccgataatcatcggcttgtgtgccaaattcagacgcttcatctcatgcgcggcgatgcacattatcagcgtcttaccggttcccacctcgtggtcgcaaattccgccgccgttctgtttcaacatccagacgcaatccatctgtgagggatagacgctcttgataccccggcttgccagccctttcaggttgaggtcgggaaaggtctgatgggagccgtcgtagcgcgggcgcacgaaacagttgaacttgcggttatacatcgtcacaagccgctccttgaactgcggcgactgctcttcgagccattcggagaagccgtttcgtatctcgtcaatcttggcgttggcgagttgtattccctcgctgtcgcgcatcttgatgtcgttgccatgctcgtccttgccgatggacttcatcatgtcagggcaggtgttgtgcagggcgtgttttaggaggtgcataccgtcatagttccggtaataccccttcaccagaaactcgtccgtgattttcatggtgcggtagccgcacaccaccgaaaactcgtccatgcttgcggaataggcgattttcacctccgtgtcgaacagccggctcatgtaggcggcatagacacccgtcggaatccagcgttccccgaaattgaagtccagatcctcgaaggcgatgcgctgcggctcggcatctttcagagcctccaacgcctgcttcacctccggcatacgctcattttcgggattgtcacccatccatgcctctatgcgttccgctttctctatgacatttccggcgatgaaacggtctttgatttcgtaaccggtcacgagcggattgtagtagatgcgcccttgcagggcagtgagcaaatcctccgccgtgctgtcggttatctcccgcatatagtcgagattgaccgtaccatatttgttgagcgacgcagacagggcttcttcgggagagcctacgttggcatggctctccaccgcgaaggaaacaggatgctcgaagatgtccgccttgacgaactttccgttttccatccgttccagcgaaaggatgtcgcgcccgcccgcatccatcatcactaacttcacgttctgcttggcgttgaggttgccgtagcgcatgacaaactcatcgtaacaggtattcagatgctctcgccacggaacatttgcctcgcgccggagcgattcataacggtacagacgctcgtaggcgtcacgcagcgacacatacaacaacgccttttccttctggtatcctttcaggtcgagcggctggaatgtcgccccgtatggcgtgatgtctttcaggtagccgatgttatgacgcccccggtcagccaccagcgacccttcgcgcaggtgcatctccggcgtgcggtggtaggcacgcggagaaaggtccacgacttcctccttcggcttttccgcttcgatgtcggggaaaaggaaagtccccaccgcttccgatggggtatctgtaacggcaggtgcggcgactgcctccggctgtgtttcctcctgtcgtggctgctcacgggaagtttccggcacggctttcacttccgtcttttccgccacttgtttctcgttatgctgccttgccagttcccgaagttctttcctacgctccggcgtcaaacccatcatcatttcatagaaaccgttgatgggaggattggtatcccagtccagtgtggcatagatgtcgtccgggtcggcaggcttggcggtgttctccgctttcacctccttattctccattgcgggttttgcagttggagctgtcggtgtaaccgtgactttcggtttgggcggagtggactttgccgtaactgcctttttcaccgtctttttctttttggaggttttcggttggctgacctcttccgtcatcccccagaggtcaagcagggtgagctgcacgcctgcggaatattgcgggcgcggttctatctccggcttttcatctgcgggttgcggcttttctgtcggagtttccaccgtctgcgccgaggatactgtttccaattttatggcaggacgctctactttattttgaacggcaactttttcttccgttcctgcctgccggattgaacccgaatacaagcgcatggcaagcctgtaatggaaatcctcgtcgagcatacggcgcaaatccccggcgatgcctgctgccttgccctcgtgcagataaaccatagcgggcttcccgtaggggtctgtgtcaagtttcgccatcgtatgcacgatgcgttccgggtggtggatgaaataggcgttgtcggtcagggcggttttcgtgtccgtctgtatcacggtcatcagccgctcgtcctgcgacatttccttcttgctgaggttcttttgcaggacaatcaggtcactgcccacctccgtgcccgcgttgtccgtgaacaggttgttgggcaggcgtatcgcggataccagattggcctgactgaacagctcgttacgcacggaggtcttggtgctattcaataccccttgcgaggtgatgaacgccacgataccgccgtcacgcacggcatccagtcctttgagaaagaaatagttgtggatggttttctgggcggagcgtctgccgaaagagtcgctccgctgaaactccgcgtcgaacacggcaatgtcaccgaacggaatgttggacaccgccaagtcgaaataattgttgaacggtctttcgattttctcaaaaccgcaggtgcgcattttctggtcgggatagagatgcctcaagattgtacccgtgagcagatccttctcgaaagccatcacatccgcattggggctgtgccgcagcatggaatccacgaacacgccgacacctgccgacggttcgagcatacgggcggggcggacgctgtaatctgccagcacgtccgcgatggtgtcggttatctctttgggggtgtagaaagcggtcagcacggacgctttcagcgaatccacaaaccgcttgtactctgtttcgtccttgctgttctcacggataagcctgtgcagctccaccgtcggggcgaacagttcgaggtcggatttcgcccaccggacggcatccgtcagttcctttgcagggttgaggatacatttcagaccgccgaaaccgcagtacctttgaagtatggcacgctcttcggttgtcgctgtcctattttccctgtcaaggatgaatgccgtccgtatcgcctcgatgttgtcccgcagtttctgtttgcggttaaacgccatattcgtctaagtaaaggacggttgctcccgtcagctccgtgtagagcaggtcgtaatcggaagacagggcgaaattgtcatccgagaggtcatagacggagaacacgttgccgacaagcggcagcagtttcaggacaaaggcttcacgcttctcttccggcacttcatcggcaaactcgttttccacgacttcgcggaggatggcgtaacgggaataatgcagcccgcgcagcagcgtgtccatcgccagttcctgcgcaccatcggcgggatagccttcaagccgtgccctctcatacgtttcggcggcacggtcggcccgttcccgtatgaaagcggtgtcgtcagcctgttcaaacttgttcgtgcggagatagtccagcaggtacagaccgtaataggaaaagtcggtctgaccctcgtttttcttcttgttgttcattactttggatttagcggattgataattaacgggataatcggttggaaaaaggaagaaaaaggcactcggtatccctccgagtgccaccactaaatccaaagtatgagtgtaatccggtatcgaagaacaattcattactctgaacaagtggcaaagttaatactatttcttccgtcctgaaaatttcttgtcctttttagcctccgggaacacaaaagtcgtgttatattccccgtcaaaggcgacaacagcatcgaaactcttgccctgtttgctcttgaaccctttgagcagcttggtatgcccttcggtgagcaggtctttgatttcatcgtcggacagggtgcgtcccgctttcagccggaacacgggcagtccgcactccgtgttgtcgcagcgtaccaccttgccgtagaaccgcatcctgcccgtgccacacttgggacacgcgcagccggagtcacggctgccgaagagcttgtcgcacgagatcagttcggaggttatctcacgtgtgtacgcctctatctccttgcggaaggtgtcgtcggacagttccccgcgctcgatacgcgccagctccttttcccattcgcccgtcatggcaacatcggcgatgcgcatcgtcttgacgacggaattgagggcaagtcctttttcggtgggaacaagcgacttcttgcagcgttccatgtaaccgcgcttgaaaagcgtttcgatgatggaggcgcgtgtggcgggagtaccgatgccacagtccttcatcgcctgccgcagtgcgtcgtcctcaatttccttgcccgccgtttccattgccgagagcagggtggcttcggtatgcagcggcttgggtttggtctttccttcggtaatggacgagcctttcggtgtcagcgtgtcgccttcctgccagccggggatggtaatttcctctttttcctcgccatagacggcacgccatccggtttgcttcacgacgctgccttttacggtaaactccactccggcacattccgccgtgacagtggtcacatccttgacgcatttctcagagaatgcctcgaccatgcgcccggcaatcatctgatagatggtattgtcctctttggagaggaagagcggtttctcacccgtgacgagcagggcatggtggtctgtcaccttgccgtcgtccacgctgcggcgtgtcggggcggcttttgcccgcaccttgtctttccattcgggctgtgtgccgatgaaagcgagcagtttgggaatttcggcaaacacgtcttcggggatgtagcggcttcccgttctcggataggttatcaacttcttttcgtagagtttctgcgcgatttcaagcgtctgttccgccgtgaagccgtgcttggcgttggcttctttctggagcgtggtcaggtcgtagagcaagggagtttcctccgtcttctccttgcgctcggctttcgtgacagtggcgcaacctgccgcctttaccttattatatagttccatcgccggttctttctctttccatttctcggaggatgagaatttcacgacttcgccgtcgcaaccgtccgttgcgatatggagctgccagaatgcttcggacgtaaagcggcggttctcccagtagcgttcacataccatagccaacgttggtgtctgcacccgccccacggaatacgtgccgtgtccggcggcgatggataacgcctgtgtgccgttgatgcccacgagccagtcggattcgctccgcgctttggcggcgaggtagaggttgtcgtatttgctgccgtcttcgagtttccgcagtccctcgcggatagctttgtcggtgagagagctgatccacaggcgcacgaaaggagtggtgcaacccgtatagtggtagaggtagcggaagataagctctccctcgcgtccggcatcggtcgccacgatgatatgttcgcttgtgtcgaacagtcttttgatgacttttatctgcgacaccacgccgctgtcgggcttgtaacctttctccgtcctgacctgacgggggacgagcgtgaatgtgtcgggaataatcgggaggttgtcacggacaaatccgcgcacgccgtagccgtcgggcatggcaagctgaacgaggtgtccgaatgcccatgtcacggcataaccgcctccctcgaaatatccttcctctctctttgtcgcgcccacgatgcgggcgatttcacgtgccacggagggcttttctgcaatgattgtcttcatgtcttcttcttttttgttgatactttggattttattttggattcagtggcggacacgggattacattttcatgcccttgcccgttttcttctgcggcttctcctgctgctgttgctggcgggcgtccttcgggttggtctgacctttctgcaacggctctctcagattctttgtagcctcgttggtcttgccatcgttgttcaccgccacctgcgtgcggctctcgttggacggagcaacctgctgtgcattgtcagggttcgtgtcgtagcggtacgggcgtcccttctccgggttgaacttgatatacatcgtggcatggaagccctgcttgtcggtcacgttctccagcttcacggctttacccgccacatagtcggctttctgctggtcggtgaagctcacgccgctccatttgctgatggggcggatgctgccgtcctcgttcgtccacgtgttgcggcgttgctccttcttggtctgtgcggcattttccccgccctgcgcctgacttttcgatgtgtcgcctttggtttcctgtgtctgtgcggtacggggcgacttgccggttcccggcacgaactccacgccgcgctgctccacgttcacttgcagggtggtgacgaactttctgccgtcgttgcgctcgatgagcttgtcgcgtacgggcagtccggcgcggagcatgtcccgctcctgcgtggtgatttccgtcttgccgatgcgctccgggatgcgcaccctgcttgccggaatgtccgtgatttcattcgtcttgcggtcgatgctgatgtaggaggggatgatctcgcccgtttccctgtccacaatgtccacgaccctaccgagattgcccgtttcgcggaggttcttccggtcattgtcggagaatttgtgttccttgtactcatccagcttctgctccttgcggatgaagtgcggcacgaggctgatgtttccctcaccgtccttcttgaaggagaggcgggcgtccagctcgaatgattcgccgccgaaggtcggtttgacctttaccaagtcggacttgccatagttgagcatcttcgtaaggtcgccggacttttcaaggttgtcccgctttacgccccatctgtcctccagctcctgccagttgattttactctcgtcgatgggctggtagccacgtttgccctgcatctgttcggatttgtcctgttgctgttctttccgttgttccatgttctcctgtttttgaggttcttgtttctctgtctgttgtgctgccatctcttcctgcaccttcttctcatagtcggaggtgtccaccttgtgaggggcgagcagctccttgttcgcttcggggtctttcagcagttgcttcatcacctctaagagattttcagcttggtctgccgcaatgcggtagaaaccgaagcggctgggttccttgcactgccggaagaagttcttgaagaagttgtccagcacgtcgccatgtcggtcgaattgcaggaaactctgcgcgttctccgcttttgcgggggtgcgcttgggtgtgccgtccgcgttcagcccggctaccacgctgatctcgcctgtcttctcgtcacggactaccagcacgtccttttcgtcttttttctttgccatctgaaaaatgttttaatgggttatttatgaaagaaattatggatacgagccttgtagaaggctatatcttcctttttgaagtccttgatatggttggaaaggaatgtcagcacgtcctcctcgctgtaataggtcttcttgcccagcgtcttgtagggcaatgcgcctacgctgcggtagcgttggagggtgcgtttgcttatctggagcaacatgcacaaatcctgattgtcgaaaaggcggatgctttccgtgatagtgggctgtttcccctcagccttcatcgccagcagcagttcgtcctgacggtcgagccgttccatcagcttctgcatccagccctcgaagttgtttcgtgtgagcagttccatgacctatgtcctccttccttttggtttgccgcccgtgcgcagcgtgtggttgtggaacagggtgtctattgtcccttcctcgttccttactgtgttgtcctccaatagccgcagtatctcggaaaggcggtagcggcagcttccgcgtaccaccacatactcgatacggtggtcggtgcgcatacgctgcatggtgcgcttgctcacgttgagcatcttcgccgcctgtgccgtgtcaagcagcttgtcttcggtttcccgcttccgtttcttctcgtcccttgcctcgcggatgtaccctgcgatgttcgcaatctgcgccatcatctccttgtaggcggaactttccattgttatcactttcatgttcagtcctttctttttgtttctgcgacaaaattcggcaataaacaaaaggggctttaacaactcactacgtgactcacgtaagatttttgcggaagatggctccgtaacccggtcaaacggcgcaacaggcagcctttcagcggaaaacgatacgtcttgtatgccgtttcgttacctttgcggcaaactctaaatgacatgaatatggaaatagtatctatcgagaaaaagactttcgagatgatggtggcggcattcggcgcactctcggagaaggtcgccgccctgaggcgcaaaagcgacacggggcgcatggaaagatggctcacgggcgaggaggtctgcgggcagttgagaataagcccgcgcacgttgcagacgctgcgtgacaggcggcttatcggctactcgcagataaaccgcaggttctattacaagccagaggaggtgaagcggctgataccgcttgtcggcacgctctatccgcacggcagatgatttgatttattcacccactgaatccgaagttatgatgaacgagaacaacgatgtttttacgatggaagacgagccgatagcctctgtggtgcaggatatgcgcaaaggctcgaaatggctgtccgcatttctggaaagctaccgtcctccgctggacggggaacgttacctgacggacggcgaggtgtcggaactgctccgtgtgagccggcgcaccttgcaggaataccgcaacaaccgcgtgttgcccttcatacttttgggagggaaggtgctttacccggaaacggggctgcgcggggtactggaagcgaactaccgcaagccgctggagtgaggcggtttcatgaaaaagtaaacgggtgacaccttttgtggtgctacccgtttacttgtcttatggggtatgtgcaatcagcaatacccggcttttccgttctgtatgaacatcacgtatgtctgccgtttctcttgtgagagtgcctttcccaccagccatgtgcggaacaggtgggtgttgtaggtattcaccctgaaagcgaccgggatgatgatttcaagggcgtacacgtccgcgtgcagcccgttttcaagctgcatgtagcggcacacctcgtagtcgttcagcacgtccgacttgcggacggctctgatggcggcgttcactgccgggacggtcgtatggaacaatccggctatttcggtggcggtcatccacacgtcgttaccggttacgctgactgccttgtcctcgatgatgattgtgtcacgtttcatggcttttctttttagatggtgcaacctgcaaattcctcgacgccgttcaatcttgcggcaaggttctccatgtcctgattgagcttctctttggttatctttgcgtaaatctgcgtcgtctttatgctcttgtgtccgagcatggagctgaccgtttcgatgggaacaccgttggagaggaatatcgtcgtggctgccgtgtggcggctctgatgccacgtgatatgcttggtgatgccgcaacgcttggcgacggcacggataccggcaaggcacgtgttataatgcggaacgggaaatatcctgccgtccccgcacagtccccggtatttgccgattatgcggttggcgatgtcgagcaggcggatgttggacaccacgcccgttttctggcggttgatgtttatccactcgtgttcgtcgaagtaggtgcggatattctcttccgtaaggttgcgcatatccgcgaacgacagccccgtgaaggcgcagaacaggtagaggtcgcggtacaattcctgtttggcgtttttcagtttcccctccatcagcaggcggatctcatctttggtcaggaaactgcgtgttgtttcctccttcttgatttcatactcgcggaacgggtcgcgcgtcagccactcgttgttgatggcgatgaataccatcgtccgtaacgggcagacgtacagccacacggtattggtgcagcagtgcttgtccgtgcgcaggaacatctcgaagtcggagatgaaagccggggtaagctcttttagggcgatgtccttcacatggtagcggatgtcgaggaactcttgcatgtgcttgtaaacggtgcggtacttcagcagcgtgcctttggctttcatgcctgcctccacctgcttctcgtagtcctcgttgtgctggcggaacacctgcatcagcgtgtggtagcggtgttccagtccgagaaaggcgttcttcaccttctccgccgtgacgaagttgtcacgctccatgatttcctgataatgcctgttgatgcgtacccgcatcttgtcaagcatacggttcgtttcgagtgccgccgtgcttctgcccgtgacacgtccacctttggtgtcccacagtttcggatcgacagtcagtttgcagctgaactgtgtctggctgccgtccaccgtgatgcgtcccatgacgggaactgtcccgtcctttttcactacctgacgcttgaggtagtagattactgaaaatgtactcttcattgtccttaatttttgggtttcaaaattagttggtgaagagtccggtgttggtacgcaaaacggggaggaacggcgcaatctttttccgtaacctgatttttcgcatgagttatggataactcactattccttagagccttgtttcgctattcgtacccgtttgtcgcattttcgggcatggttacgaacaagtaacgtagcggcgtcaggatttggcttcggcagggattgtaatggcttcacggattatcgccacttcaaccaaaacccttgtaactcaattctatcactatatctttccgcatttcacttttttgtagtaactttgccgaattaattttaggtttttacttaagattattagagaaaaaagtcaatgcataattgactatccatggggtggtgttgcagcactatcccatttctttttgaaggtgtgttatctcataagctaaattattttagagggttaattaatggttattatattcttctcgtcatcttttgtataggtgaatcttatatttagtcttaagacttttagtacgtgttccactccatcttttactctgaatttacctgtataatgattgtctaatatctgagtgttatttacaatgaaattgactccataataaagtcttaacttttctatcatgtctctaacagatatattattgaagcaaatcaaaccttcacgccaaagaaaatgatccgggtcttttatctgtcctttaatcaatttgtttcctttcagactggccattgtattcggctccaatttcattccacttgtagtagtaccaggtcttaagatttctacggatccttccagtagggctgtttcccaaagactgtctgttgcatatgccataacgttgaattcagttcctaatactttgacattgcatttatttgtctctacaataaaaggttgctctgcgtttttagttacagtgaagtacccttctccatccagttttacattccgaatatcaccgttgaaacttccaggaaaggttaatgtgctcaatgaatttagccatactttagtaccatctgccaatataagttcagcccgttgtccggcaggtacatgaatggattgaagtgagtcgttttcttgtgcccgatttctttcgaaccagtattgtgtacctaataggatcacagcaaatattgctgcaatttttgctacctctatccaaagagtacgcaatgtgaatgtccttttggaatacttctctttcttcataattggtgtcgtacgccataatgctatatcatatagcttacgttgagccatgtattcacgcatattttccggattgtcttgtatccattcggtaacagattgtttttctgtttcagtgacatttccggatatatatttttgcagtaattcagtattcattttctatgctattttgtatattaacgactaagatggaaacaaccctaaaagaaaatagaaaaaaataaaagaaatctcatctttgaaagaaaaatgagataatttgagggggtcaataataaaagaaaaagtaaaatagaggaagataatctttcaacgttattcgtaatgcctttaatgcttttgatatatgatattctactccttttacagaaatacccatttgtttagcgatttccttattggacttattctcaaacctacttaacagaaatgccagacgtgtctgttcggatagtgattttaaagtatcctgaatgatatgctctacttcatctgagaatatctcgttaggatcacatgactctaaggtggaaatgcggatagaaagttcctgttgatgccagtcaaccatggattcaaatgctgcgcgttttacttcttcgtgcttcaagtaatccaaagctttattttttaatatggtaagtaaaagcggttctatataatcaatttcctctgttttcagtttttcccataatctgattagtgattcagaagtaatgtcttccgctgccaagtcatcatggacatacgatttggcaaagaagaaagatttcttataataagaattatatatctcattaaaagaatttagagtaacattgctcattggtatgttagtggtgcttctcatttatatgtgttaaaatggtatagcaaagttaataataaacatttgataaaaacaaagtcctactaaatatttatgtagatgctgtctcaaaatactctgagccccaaagatttgtatttaacctttggggctcagagtattttaagacagtacttattctatgtttttatttaattgttataccatcaggggcattaattgttgaagttatttttccattaagcccttttatatgtttgatatataccacgcctaacggggttgggaaagtaccttccgcccattctaaatcacctaagtgaggggttatgcgaagagtcttgcaaccggcatccagtatttcaactcccaaaatatgttgtgtcatccaaggggtaggtcctgatgcccagccgtggcaaaagctgtgtcggaaactgggatagcaataatcaccgaagtctccatgaatatcatctttatcctcaggtacgaaatcatctaatctgccggcgttatgtgtccagtccagattgaaatcttcccagaaagtggttgctcccaaatcaagcattcctccccaatattggcgaatgatgtctactgcctgttgatattcaccggcttgtgcaagtgcctgtaacatgtagtaaccataaaaggttgagaagttctttgcaccgcctactgaaatcacttcactacatgctttctccggtttcattaatccggctatggacatcaatgcggctgcctgtttcagattattaggttgttttatctgcttcttcaaacgtttggatatgttaccgcacttttcaacatattctttttctccaagttgttcacaaagctttccggcatcttccatagcccagcaaagtaaagctctgcatccagcctcaactcctgctttattaggacttgagggccaatccagaaaacgctgtttagccagggtttcatttccattttcatccacacactcgtcgatgcggtcaattactccggttatgtagttgcggtgacgttgtaggaaactgatatttccattatgcatataccattcatgatgaataatcagataccacatagaatatgtactgattccgtttaaccactggggaaggggaaattgctcacaggccagatcaatgctcttattcactacttcgttatatccgaatacactcattatcgtagcaacctcgggatgcatatctcccaaccaaataagtcggtcacgttttatgccatcccataagtattcctgcatgttcaggtgtacagtataagctcctgtcatccatatttcattcaagcgctcgtcattgcaacggaatgaacccaggtaagggatattacggtaacgcagaatggcgggagcttctttcaggtgtatagtgaagtcggaacttaacaggtcgatacgtacaaagcggaatcctgtgttgcctatttctatttgtccgtcgctggggatttgtaggaccatatcacgcattgcatggtcgttggtggaatacccttttcttcgcttaccgccatcgtgctgactgcaaacctcacttacagattctccaaaacgaatgcgcaccgaagaaggtttccagggtttggacgaacccagcaccagttttaatcctccgtgtagttcacgtccatagtccaacaagatggaagctgtgtcgctttctgttgtgtgtagggaacacatatttcttttacccaattccgtctgtcctgtaccgggaagaagtaagaccttcgcgtctttaactaaagagtcattactgatccacattatctttttaggaggtatatacaggcgagctatttcatccaaacgggtactcaagctgtctgtaccaaagacagggggtacgtggagttgggctttcgctgctcctgcaattaatagcgcaattgccgttattgcaattcttatttttatcctattatttctcattgttaccacgtttattcaatttaaaataatcgatgtctggtgcccatccaaagctgcttcccatacggataacattgtttcccgctaataaagttacaggaatggtcactgattctattttctcctgatcaccgctattcaggtcttttatttctgtctttattccatttacggatatctctaattttctgttcttctcacagctatagtaaacggttatatcatattctcctccttgttcactgtacacttcttgccattcggctatgttttcttgactgcctccaatattcgaaaccttcattttgccggaacaattaggagaggctgtgtagaaaatctgtttgggatttttgcccaagtcatcatagcagggtagataggcccattcggcttcataaagaaccgattccagacgtttttctgcctccagtttccatattgcgacactgtgtggtggcaatgatacttgtatgctatctgtcatgtcttccagatctctacactttatgacatcccgaaccttaactttacctcctaattcaagagcttcaaaagagacattaaaatcacatatcgtatccgatggattgtacaaagcaacagcacgcacaagtccccgtctcttttcgatgtctttcacaaggacatactcttcattattatgctgtaccacgtatgcttgtagtcccaatgtgtcttggtttaacgcaatcaactccttatttttaagtaatgctaaggagggctcaggaattgttgtcatatcacaaccgataagtagcggtgaactcataatacaccacattccaaaatgtacttcttcttcttccggtttcaaaccacgaccgacttccagcatatccatatcattatagtgtcctttaccggcataagccgatagatagagattcttttggataatgttttttacagaactccaacgagggcgaatatccggactgatatgccaggagcgtgccatttttttagcccatgtgccgggaaatgcccatcgacagatatttatggaaacgtcggtacgtcctgtgttcttaattgcctcacaaatggcggcataacgtttttcttcgtcaagccccagttctttggcaccacaatagtctatcttgatgaaatcataattccattctttcaggtagagatccatgtcttgttgttcatgcccgtaaagtcctgaacctacaccattggcatcattatcatagatagaaccacacgtattatcacctgcatccgaataaattcctgcccttaatcctaatgagtgaatatagtcagatataggtctcattccattagggaagcgttccggatgtgcatgcatctttccggtttcatccctccaaccaaagaaaccatcatctacgtttatatagagatagcctacatctttcagcccatgtgtaattaaagcgtcagcttgcttttttatcagttcttcattgatatctacatggtaggtattccaggaactccatcccattaagggaggtgagaaagattctgatacttttttcccattggttgaggtacaagaacttatagcaagtataagagtcagaagtcctcctgttatcaaatgtcttttcatgagtatttttacttttatgtccgaaagttaattaaattagtatatactacaaagtgttttgatcataatcgaaactgactttgttattatgcaaatgtcgggacttcatgttaattgaggaatggtttttagttcagaaaactgcatttttgtacgaaaggaggataaggattagccgataatagctatctcattgattcctctcttccttctttgtggatagtagactataaaagtatatatctatgtaaagtcagctgatgattggggtattcacactttaaagacaaaatgaggatttagaatgagtccttatttttgtgatatttttaatcaacgactcggaagtcatttttcttgtaataagagtgtatatctcattaaaagaatttatgatagcattgctcattggtatgtcagttgtgcttctcattatgtacattaaaaaggtatagcaaagttagcaataaacatccatataactttatgcacattaacaaaatatcatttgctttgctaatgatgttttgttaatgtgctagctatcagtgaactgtatttgccgacaagttacctctttatgtaaaagcatttaccgcaggatgtaacgacctttaccccttattgtaacgctctttacctcggcatgtaacggcttttactccggcatgtaaatgaagttaccatttggggtaaacgatgttaccgtgaaaggaaaacaattgttataacttgaagtagttagctactgcttctgcacatcgttccccatcaatgccggcagaaacaataccacctgcatatcctgctccttctccgcatggaaacaatcctttcactctcacatgctgcaatgtttctctgtctcttatgattcgtacaggtgcggaggtgcgtgtctctacgccaatcattactgcttcattggtcaggaaaccgtgactgtatcgtccgaattgctggaatcctttgctgagtcgttcagtaatgaacggtggcatccagaagtgtaggggagaagagattaatcctggagcatacgagctttccggtagatcataactcagcttcttgcgtgtaaagtcctgcatccgttgtgcaggtgctgtttgtcgcatattgccttgttgccagcaattatattccaatgcctcctgaaagtacatcatgctgagttggggataggtaatactatcatcctgcatagctgttcctctattttctatcttcaatccttcgtcttccagatcttccggccttaactctacgaccattcccgaattgctccaacgcgagccacggttactgggactcattccgtttactacaatctgttgcgggccactggcagcaggtaccacgaaaccacccgggcacatgcagaaactgtatacccctcgtccgtccacctgattcacaaaactatattcggcggcaggcagatattttccccgtccgtccttgctatgatattgtatctgatcgattaattccgaaggatgttccaaacgtacaccgactgcaatacctttagcttcaacctccacttgattggcagccaaccaacggtacacatcccgtgccgaatgtcctgttgccagaatcaccggacccagaattgtttgtcctgtatgggtttcgataccttttatctcatcgttttcgataatcagcgcctccatacgtgtctcaaagtgcacttctccgccacattcgagaatggtattccgcatattctctatcacacgtggcagtttatccgttccgatatgcggatgtgcatccactaatatagcagtagatgcaccatgctggcagaatacattcagtatcttgtctacattcccgcgttttttgctacgggtataaagctttccatccgaataagcgcctgcacctccttcaccgaaactataattggattccggatttacagtatgctcccggctgatctgagccaagtctttttttcggtcgcgtacattctttccacgctctacgatgattggacggagtcccagttctatcagtctcagcgcagcaaacagtccgccgggaccggcacccacgacaataacctgtggtttgtcttctacattcttatagatagtaggctggtattcatcgtctttgggcatttcgttcagatatacccgtacattcagattgacgaagatggttcgttgccgggcatcaatgctgcgcttcaagatacgtgtcgcattaatattccgcacattcagtcctttttcctgtacgaggtactcttttaactgttgttcattggcggctacttctggcagcacgcgtagttggtattcttgtatcataatttattttttcaccacagattacaccgattgacacagattagattatatatctatgtattccgttctgtagatttgttacgttgaaattaattagtaatcctaaattgtgctcagaaagtttgaggtatgtcaaaatttgagcagtatgaataggtaataaattctctactgactttaattcgagcacaatagaatcttctactaaaatatctattctatatccattatttaaagtagttcctttataattaatcataagctctttttgtttttcaaactttaagccttgtttctctaattcatagcatagacaggtttcataagtactttccaacaaacctggacctagaattttgtgaacttcatatgcgcatcctatgattttgtacgttatatcattaatatttttcattattaatctgtgtaaatctgtgtaatctgtggtgaatcacccgaatagcaccctgaatgcctcctccaccttcctcaccggtatcagttctattttaattttcttcgtatcaattccttgtaaattgtatttcggcagcacaaaccgtctgaatcccagcttctccgcctcaccgattctttgttcaatcctattcaccggacgtatttctccggacagaccgatttcccccgccatacagacttccggttcaatagccgtatccatattgctggaaagtatggcactgataaccgccaggtctattgccggatcattcaccttcagtcctccggcaatattgaggaacacatctttctgggccagtttgaagcccactcgtttttccagtactgccaataacatgttcattcttcgaatatcaaatcccgtggccgaacgttgcggattaccatataccgcactgctcaccaatgcctgtgtctcaatcaggaacgggcgtatcccttctatagccgaagctatcgctatgccactcatcccttcatgatcctggctcagcaataactccgacggattactgacttgccgtaatccatcctgacgcatttcataaatacccaattccgctgtactgccgaaacgattcttgatactacgcagaatacgatacatataatgctggtcaccctcaaactgcaacaccgtgtctacgatatgttccagaactttcggtccggcaatgctgccttccttattgatatgcccgataagcaataccggggtatgcgtttctttggcaaagcgcaggatacttgccgaacattcgcgcacttgtgcgatgcttcccggggaggattcaatgctttccgtagaaatagtctgtatagagtcgatgatcaccaactccggacgggtattcttgatgtgaacaaaaatctgttccaatgacgtttcacaaacgatgaggcaatctgtggaattgtgcgataaccggtccgcacgtaatttcaactgacgggcactttcctcacccgatacataaagaacgcgcttttcagggatatgaagcacagtttgtagtaccaaagtagacttaccgattcccggttctccaccaatcaacaccagagaacccggaaccaatccgcctcccagcacccggttcaactcttcatcatgcaagtcgatacgcggttcatcatccgcttctatttcactgagaacgatgggttttggcttttctgtctcaatcccggataccggacgtttgtttacgacttcttttcgtatcacttcttccacatacgtgttccactctccgcacgacggacatttgcctacccacttcggagactcttgtccgcagttgctgcacacataaaccgttttttcttttgccataaggaaatctacttgctgaatgatttgtcaaagatacgaatttagctgtttacgaggcagaaaaacaggacaatttattccacttcgtacctcctttatacctccttcgtaccctcttcgtatctgcttcgctattttcatccttctatagaagcgaaggaaatgcgaaccgggtacggctgaaaagagcttttgaccagaactgttcaggcatcaagttttatgaatagtccgaaaaactttcgggctgacagagtatttgtagagcttaaattgtggattataacagattaaaacagcgagaaagcatattgtggagtattgtgttattattgggtggttttatgttatcacttcttaccctatagcgctatatttgcgtggacttacgaaagaattatattcataaataaatagaaatccgatagatgaaaaaagtgttattaaatctggtattcctttttgctttggtatgttttgctggggcacaggagtttaaggttgctgatattttcagtgacaatatggtgttgcagcaaaagataaataatccgttctggggttggggaaaaccgggaacgaaagtgactatttccacttcatggaatccggataaagaatatacgggagttgttaattctaaaggtacctggaagatagccgtacctacgcctgctgccggaggaccttatgaggtgacagtcactgccaataagaaaaaagtctttcagaatgtgtttgtgggagaagtatggttggcaagcggacagtccaacatgagtatgccgctgaaaggatattattgccagccggtactgggatctacagaggccatattgtcttcagcaaaaaagcaaatacatttcattaatatacctactttagcggcctataaaccattggaacattttgaggccgaatgggtgaaggcttctccggagaatgtagcggaatgtacggctgtgggatggttctttgcagatttcttacagcgcaatatggatgtgccggtcggtattatcaatgccagttatggaggctccaacatcgaagcatggatgaatgcggaagcttgtaaacaatttgatgatatccccgtaccgccattgagtgatgaaacttctccgtggattagtaatgtgcctacggttctgtacaatggcatgattcacccactggtgggttatggcataaaaggtattatctggtatcagggtgagtctaatattttcaatgtgccccgttatgctccctcggttgctgccatggtaagtaaatggcgcgaagcctggggattgggagaagtacctttctattatgcacagattgccccttacgattataaagagtggaactttttcacacctcaatggccggaagtttcggcttatcaacgggaagcgcaaagacagtgcctaacgttaattccaaactctgcaatggcagtattgttggatgtaggagagcgatatctgatccatccgaggaggaaaaaagaagtaggcgaccgtttgggcatgctggcactctctaaaacctatggaatgaaaggatttgaagcggaaagtccgattttcagtaaaatggaggttgagggaaataaggctattattcattttgacaatcaatttaatgggcttaccagctatggaaagactttggaactgtttgagatatccggagacaataaggtattccataaggcggacgcctatattgatgaggaaaaaggtactgtggtagtcacatgtaagtatgtggcagagcctaaagctgtgagatatgcatttaaggattttgtaaaggcggaattatttggtacaggtggtctgccggtatcttccttccgcactgatgattgggattaattaataacatgatactatgcgaaaactattgattttattcgtatcggctttgctcccgtggttatctgtccggtcacagaaaccggtttataaagatgcgggacagcctgttgaaaccagagtgaaagatttgctgaatcggatgacattgcatgaaaaggtgcttcaactgaatcaatatacatttggggagaatgataatcccaataatataggtacggaggtgaaaaatcttccggcggagattggttcgctgatttatctccataccgatccgaagttgcgtaaccggattcagcgtaaggcaatggaagaatctcgcctggggatacccattctttttgggtttgatgtgattcacgggttgcgtacggtgtatccgatttcattggcacaggcttgtagctttaatcctgatttagtgactcaggcttgcgggatggctgctaaggagtctgtattgtcgggtatcgactggacattttcccctatgattgatgtggcgagggatccccgttggggacgtatttccgaatgttatggagaagatccttaccttaatacagtctttggtgtagcatcggtgaaaggttaccaaggcgagaaactgtctgatccgtattctatcgcagcttgcctgaaacattatgtaggttatggtgtatccgaaggcggacgggattacaggtatacggatatatcaccccaagccttgtgggaaacctatctaccgccttatgaggcctgtgtgaaagcaggtgccgccacgcttatgagcagttttaatgacattagcggagtaccggctacttcaaaccattacatcttaactgaaatactgaagaataagtggcagcatgacggttttgtcgtatctgactggaatgcaatagagcagctgatttatcagggtgttgccaaggatcgcaaagaagctgcgtataaggctttccatgccggtgtggagatggatatgcgggacaatgtttattatgaatatttagagcagttggttgctgaaaagaagatagaaatttcgcagatagatgatgcggttgcccgtatacttcgggtcaaatttcgcctgggcttatttgatgaaccttatacgaaagagctgaccgagcaggaacgttatttgcagaaagaggatattgctttggcagcgcgtctggcagaagaatcaatggtgctgttgaagaatgaaaagaacttgttgcctctttcttcaacggttaaaagagttgcgttgataggacctatggtcaaggatcgttccgatttgttgggtgcctgggcttttaaaggtcaggccgaagatgtggagaccatttatgaaggaatgcagaaagaatttggtgataaagtgcggctggattatgagcagggctgttcattggatggaaatgatgaatcgggtttctccgctgccttgaaaacggctgaggcatccgatgtagtagtggtatgtttaggtgagtccaaacagtggagtggagagaatgcttcacgctctacaattgctttgcccgatattcaggaaaagttgcttttgcatttgaagcaggcgaataagcccattgtacttgtactttccagtggtcgccctcttgagttgatcagattggaacctcaggtagaagctatcattgagatgtggcagcccggtgttgcgggaggaactcccttagcgggcattttatcgggcagggtaaatccttccggaaagttgtcagtgacattcccgctgtctacaggtcagataccgatctattataatatgcggcagtctgcccgtccgttcgatgcgatgggggattatcaggatattcctaccgaacctctgtatccgttcgggtatggattgagttatactacctttacttactctgatgcaaaactttcttccttgaaaatcaagaagaatcagaagataacagccgaggttacagtgactaacgcgggtaaggtggaaggaaaagaaactgtgctatggtatgtgtctgatccgttttgtagcatttcccgtcctatgaaagaactgaaattctttgaaaaacaatcgttgaaggttggtgaaagcagagtctttcggtttgagattgatcctatgagagatttgagctatacggatgcaacgggcaaacgctttttggaggcgggtgaatttatagtgtcggtaggtggccggaaactgacttttgaagtggtggactaagttttccgatgaataaacagtctttgataaaaatagatatgacttatgaatagaataagagtaaatatcctgttgctgttgttgtgcatattcattcctggagtggcgcagaatgtatctgacggatggaataaaaatagaacggcaagattgaccaaacctgtatttgtctataacaattggtccgcctatgatgaattgtctgataacattcctctggatgaggcattggctatgaaagagttggatcacattgtgcgtttgaaaaaattgggtgtacaggtggattattatatgatggacgcattctggtttgatgtgaatgaaggatatcgtaagtggaggccggactgttggccggaaggtcccaaacgttggctggatgcgtgtaaaagagaaggaataaagcccggattgtggttttctacgaacctgctgcgcataggtggagaggcaaatacgatgaagattattccggaatgggaaagctctgtagcggaagacggaacaactctttgtttgttcaggggaggatatttgcaccatcttatgcagaccctgcaaatgtacgcggatatgggtattaagatgttcaaatttgattttgcttattttgatgcggcaactcctgatgccaaatgtacgatgttgcctactgatattgaggaacagaataaaaatgcctttatttctgccataaaagaatttcgttataggaatccggatgtactttttattggctacaatggttttgggggtgatatggaaaatacggttaccccgtttcgaaaaacggtagacctgcgttggctggaaatatttgatacgatgtattgcggtgatccccgcttatccgatgtgccgatgatgaacttctggcgttcacaggatttgtattcggatcacatgacctttcaatacttgtttaacggagtaccggtccggcgcattgacaactgtgcttttatgattggtaccacgggtacttgttataacagggctttaaatgcttggaaaggcatgatgattctgacgatggcacgcgggggctggctgaatgtctgtcatggaaatattgatttgctaagtgatgatgatgcccgctggatggctaaagtgcagcaattgtatatgaaggtacagcagtatggaagtatttcagcattcggggctatccccggcaaagcgctgccatacggttacatggcttccgctgaaggaggaaatctttatactgtggtaaacgcatcacaagagaaagccaaagtaatgttgcctgaagcgacaggaacggggagggtgctttttacggacagtggttttatgcctgttttagaaaagaatattgtggaattggggccggaacagatggttgttgtcggatacggcaagttcagtacccgggagtatgatttaggtattgagaaagatatcgttatccctgcaacaattcaaaaggtaaaaatagatgtgcaaaagaaaaatgagcataccttgcaggcacattacaccccttcgaaagggaaaactgtacggattctctttcagcaattggatgagcatggaaaagcattccgttcgtggggcggtgctcctcctaccgggattaaaatggaccatttcttcaatatagaagtaaagcagggcaagcgttctgttccgataaagaaatcgcatgataagatgatctggtgcggcttgtcatgggcggtaggagaggtttctgctgacgacataaaagaaggacgtccgttggaaataagttgtaccgctatagatgggaatagcgaacactgcttattggaagtttacgaggttgaatattctgctgaaaagaaataagattggaaaagggatgactggaacagtttcacagtcatcccttttttgaggttatcggtctccttttttcagatccctgaaattcttgggtgtttcattatatacttccttaaagcacttgatgaaataatgtgcttggttaaagccggtcaggtaggctatttccgctattgacaaatcactgtttatcaatagctcggatgcttttcgaagccggatagcccggataaactgattgggtgtctgcccgataagcattctgaacttcttatgaagcactgtcttactgatattcatggctattgagaattcctcaatgttgaagtccgccttatccagattctcttctatcaccttcatggcctgttgcaggaatacttccttggaattgaactcaatagtatcactgtctttggctatcaggttctttaggagttgttcttttcgtttctggcgcgtattcaggatattcataatctgattgatcaatgcttccgtatcaaaaggtttcttgatatagatgtcagcgccttctttatacccccttagttcatcttcagatgaagttttggcagtcagtaatataacgaatatatcggcataaagggaattttcctttatatggcggcacagtgtcagaccgtccataccgggcatcatgatgtccgatattacgatttcgggaagatactcacctactaatttcaaagcttcttctccatgggtggctgtcactacgttgaagtgctccgccaatttgcccgcaaggtatttaagtatctgttcgttatcttctaccagtaatatggtggcactgttctctatattggttgcctgtgctttaaattcggtaatatcagttgtttcctgatattcttctgagttctctaccggtagtttgatgcacagtgtggtgccttgtccgggttgtgagtcaatagaaactgtgccgttcattactgatacgaatttcttcacgacatataatcctatgcccaatccgttgggagtgttttccttattgtattggggttcccggtagaatttattgaatacggttgcctggtataactgattgatacccggtcccgtatcttttatgaatacactcaattgtccatctatatattccagtgccaccgatacactgccttgatcgggggtgtacttaatggcgttactcagtaagttatataaaatcctttcaaacttcacactgtcaatccatatatgtatggaggggatgttggcctgataggatagctggatttttttagagcttgccagataattgaatgcattcactatgatgcggcagaatgatacgatttctatgtttctattgtttatctttacttcagagaattccactcgcttgaagtcaaggattgtagaaaacagatcggataagaatgcagcattcttggtgataatggacagcctttcatactgaatatcatcttctttggtttcacgcaacatatcattggcaggtgccagtatcaaagataaaggcgtaatcaggtcgtgcccgagactttcgaagaaactttccttttcttttaatagttcttctttcttcaaagtctccatctcctgtatcttttgtatactctttcttctgtagtgtctgataatcatatatattatgagtgcgatgctcaacaggataatcaggcaggaaatgaaatagaacaaaggtgttttccaccagggcggagcgacaataatgctcatggaccagcatggcttggtgcctgactcttcgttatatttcataatttccaaggtgtatgtgccggggttaagttgtgagaaggtcaggggtacggacatatcgagatattgccagctgtcggtaaaaccgatcatcctgtataggtatttattgcagtagttggcttcccctatttcagtaaaggacagggatatccatttggaggcataagacagggtgatggaaggaatatattcggtattctcttttaaaatcacccggttgtttatcgtatcgcctacctgtatcttttggtggttgatttccagatcagtcaatatgagtttggtcttatcatactgatgcagcgccttttccacatccacaaccatgagttgttcggtattgccgaacaggatatattctttgttttcataggttattttttcggctgaaaggatagaagagttgccccaatagctgatattcggttcgcagatgcgctgttcactgtttatgtagcagaatatcttctcaccgataaagaaccatagattctggttatcatcgagcaacaatgacttgatggccccttgcggcaatgggtatgtagggaatgcggtagaaacttgcagtgaatcattggatacttccatcttcaacagattgtttgatgttcctatccaccagcatttattacttttatcttctatgatagagtacacaatctcctggtcgatgattttgtcttttagagtgacctggtctgatgcattgaagatggagagcccgttatgtgaagctataaacaattgattgtcacgataaggtatgatagcgtttatcctgtcccgactgaaatagtcataatgaatataatcttttatttgccggttcttcttgtccaagcatagggacatcagaccgttttgtttggtgcctatccacactttattgtcttttatatagaaagtcgtaatcttttctaattcagtgcttgccgtaaattctttccattgaatttcctgtgaattattattctggaaagaatataataatcctatgccatcgtgccccactaacgtaatatccttattttgcccgatagataagatatggtccttgaatttgtctttgcttttataattctccttttcagtagaggtacgcatatcgaaatgatacataccgtcacctaaggttcccaacaatattttgtcttgtaaaagggcgatagaagtgatgggagaatgcgttttacgaattgagagcaactggctgattcccctgtctgaggaggagtacttatagagtccttttccgtatgaacctatccagatgttatcaaggctatctttataaatggcattgataaaagtggtacccagatgttctgtgccgggtagtggataaatacgctcttgctctttatcatatacttttattccttctccccaggtgccgatcagaagtttgtttgcttctccttctatgcggtatatgggggtattgctgttatgcagatggatggtccgggcttgttcgggttgttggctccaggttaattcatagagcgcattatcccatgaagagtaatacagtgtattgtcttctccggtgtcgtgtagttgtgtgatggtctggttcttgggggtaatgtctgtccatgtttgttttcgggagttgtacatcacaagtcctgtataggtgctgatccatatatgtcctttaggcttttccacaaaactggagacaatggctcctgaatggctacgttcggctgtgaaactggtacgttctgtattcttgggagttaatttgcatataccttcttcccagcttcccaaccagatgttatgatcagagtcttcgaatatggaaacaatccggttagggatgggttcggaaacctgctcattgaggtggatgaactggtcggtccgcggattgtatatatctactcctccggtcttaaaaccaatccataacaagcctttggaatcaaggaacaaggtttctatattattattcttaagactgttgtttgttgctttccccgatttatagactttaaaccgatgtccgtcgaaacggttgagcccatcttctgtggcaatccacatataatagtcattttcgcagatagaagtgatttcagaacttgataatccatctgctaaatcataatgcaatagcttctgtgctccggcagtggaagctaaaaagagtacaaatataaataatagctttctcataattttaatgtttagggcaatgcatcatatattgttcgagtaaatcctccatttcttttgcaggtaaagactctattaaacggatatgctttcctgtttttgtagctctccatgtattattaccctcagagtctacagatataattccccgttcactgatataataaggtgtatagtcttttatggctacccaaacagttgcctgatcccaactccatctaccttgtggttctccctgcgacatgcttagtaaaaacacatcttttataggatgattttctacaggcatccggctaacccggcgaccggttattatgttgtagccaatctcgaatccgcagaaaataatttctgtaggccaatggttcacaacgaaagaggaggaggaagcgtcacaatatatattatattctcgtccttcggggaatattcctgccatggaaactaactttttaacctttctgcgtacaagttctattcctgtttccggtgaaaattcgtctccttttgattgtagtagttcttttaggttggagaaagctccgatggtgcagattgtgacactattatccggttgcgtgcataaaacagagcgatataccttgacggcattgggggcatctgatgatttggctatccggtggggatatttctgaggcaagacttcagtccatttcttgttgtgcgggcattccaatgtgactgcactttctcctttggcaacgccaagaggaatatcaggtcgcttgaagtatgtattaatgatttcaatgcaaggaattgttaattcggacttattagaagatacagtagccagtatatctacatatccactatcagctaaggcatgcatcactgccatggcacccacgtcatcgtagtcaggtcccaagtccgtatctaaaatcaatcggaccttatgagcattagttatatttgaagggctgcatccacaaaggagaagcgataagaaagagtataaaataaatcttattctagtcatagcgtactgattaaaattcaatattcaaaagtaggaaaaaataagcgatccccttctttttgaaggcgcttaaaaatataagaatcgtgccgattgataacaaattcctgtttttgatagcggatacaggaatttgttattcttttgtgcttttctgttatcctgtttataaagaaacagggacttttgcatcagtaactttttaattaaaaatattatgaataaacaacatgttttgcaaagacgaatcatcttcggattgctattccttggtggagtaactttctcctatgcatcaacggaaaaagatctcggttcttcaacatcagccattacacaacaggctgtaactgtaaaaggttctgtgaaggatgctgccggtgaagcgataattggagcctctgtagtagtagaaggtactacgaatggtctgattacagatgtagacggacatttctctattcaggcatcagtaggacaaaatctcgtgatttcttatataggttatgaaacgcaagtcgtgaaaatagcccgggcaaaccagcaaatcaatattgtattgaaagaaagctcggagttgatcgatgaagttgtggttgtagcctatggtacgcagaaaaaagccaatctgacgggagcggtatcttctgtaaaggtcaatgatattaaagacattccggtatccaatacttccagtttgctgcaaggacgaatgagtggtgttaccgtgagctctttctctgcgcaacccggtgctgagggagatgtggaaatccgtatccgcggtataaacacttttggtgacagtaatcctatggtgctgattgacggtgtggagggaagcctcaacagtgtttctccgaatgatattgaaaacatatcagtattgaaagatgcggcttccgcttctatatatggtgtacgtgctgccaacggtgtagttctggttacaacaaaacgaggaaatgcagacaagaagacactatcttacagcggatcctatggtgtacagaaagctacggttctacctacatatattaattcatgggattgggctactctttataatgagcagaatgaggcaatgggagatgtaactacgaattttactcctgaaatgattcagcaaatgaaagatggatcaagaccggatttgtttgccaatacccgctggtcggacaaaatattccgttctgctcctatccagacccaccatttgtctatgtcgggtggtaatgccacttctcattatatgggttcggtaggatatatgggacaggatggtatcatggaaggtacaagtactgaccgttttaatttccgtctgaatgctgacagcaagttcattgatataatcactttaggactgaatgtttctggtaaccatgaagaagtagaggaacctaccattggtacttactatgtattcgaacagatgaaatggcactcccgtccttcggtaccttataaatatagcaatggtgaatggggatttgtggatggtaacgataaaatgcaggctattaagaatccggcttatgccactaccataacctcaaagaagaaatacagccgttttgacggtaaggctttcctggaaatagaaccgattaagaacctgtctatcaagaccagctttgcttatcaatataaccaatggaacagtattggtgctgaacctgcttatattcctcaggattcgtatggtaaccctgtgggaggtagtggtaagaattacctgaccgatgcttattattccgaaactcagtggatcaacgaaaacattattacttatcactttgatgtgaacggccatgctttcaacttcttgctggggcagtctaaccaatataataatttccgttctaccacggcaacaggtgaagatcttccgagcgacaatatcaccgtattgaacggtgctttaagtacttctgctaagggagatgctgccgaagctgctttgagatcattctttggccgtgtgaactacaattacaaggatcgctatttggctgaattcaacctccgtcgtgatgagtcttccagaatacctaaaaagaaccgtaccggttatttcccttctgtatctgtgggctggaacattgctcaagaggctttcatggagaaatataactttatcagccagttgaaactaagaggtagctggggtgaactgggtaaccaggagatcggttactatccgtttgcacaatatatcggtttgggtaataactatgtatggggtgacaacaaagtttcgggtgtggctatttcctcattggctaatcctgacattaaatgggaaacaaccgctactacggatataggtatagatgccgctttcctgaacaacaagattacccttactgctgactatttctacaagaagacttctgatattttgctgcaattgcccattcccggaattgtgggtatttctactgaaccttatgtgaatgctgcatcagtaaagaatgaaggttgggaattcgctttaggttataatgatcaatggggcgactggaaattcggtgcaaatgtcaatttcagtaaggtgaagaatgaaattctcgacctgcacggtaaagattcatggattacagactggtctatcaatctggaaggacatcctatcaattcttattatggttatgtagccgatggattgtatcgcacacaggctgaagtggatgaagctaatgaaaagaattctgttggcggtggtgctttgaagttgggtgatatccgttataaagatgtcagcggtccggaaggtaaaccggatggagtagtggatacttacgaccgtacagtgattggtaatccgttccctgattttacttacggttttggtttaaatgccgcttacaaaggatttgatttatctgctttcttccagggtgtagccggtgtagaccgtattgtgatggattatcctaccgtttcgggtaatgttacgacggcattcctggatcgttattctgaaagtgctaaccctaacgggaacttcccgcgtctgggtaatggtgactataacagccaaccctcttcattctggttgaaagatgcttcttacctgcgtctgaagaatattgaattgggatactctttcaaacaagaatggattcgcaaggcgaaactggaacgcttaagaatatatgtttctgcacagaatatcctgactattaccggcattgacgattatgatcctgaaaagtatggaaccgatactcgcggtcatgcttatcccaatgccaagacattctctgtgggcttaaacattacattataatttaaaataaagaagatcatgaaaaaaatatattattcagttattttgtcattagccttttccctcttttcttgttcagacttcctggatcgtgaatctttgtcagagttgtctaacggtaatttttggaatacagaggctgatgcgactaaagcgttggtaggttgctacgatgctttgcaaagtgaaggtagcttgggattttgctggccgggtggaaatacttgtagtttgcgtgaattggaatttgctacggataacggctattttgcctggattccgtgggtgggccccgatgtgatcactaccaataccatgagccccacagcagctgttactaaggctgtatggaatgcttcttatgcaggtattgcacgatgcaataatgttattgaaaaagtaccgcaaatgctggagaacggtaaaataggtgaagaagcaggtacaagaattgtttgtgaggctaagttcatcagagcgttgttttataatcacctgaccagtctgtaccgtgatgttccgaaggtgtttaatgtgttgactactgaaacgagccaggtacctaagtcgcagaaatcagaaattgtagctgacataatcaaggacctgaaggacattactgccgaaggtatgttacctgttacggctgatagaggccgtgctaccagaggtgccgcattgggcttactgacccgtgtatacctgtacaatgagatgtataaggaggctgccgatgctgctttacaggttattaacctgagccaatatgaaatagacccgaattacagtaccctgtttacggaagctggtggtgccagcaaagaaatagtatttgccattcgctttaaaaataccgaccaacaaaatggtgagggtggtttcttagcttataactacggttatccgatggaatggcagttgccttatccgaatttagcaaacgatttttattgcaaggatggtaaacctattacctcttcgggaatctatgatccggatgatgattcaactcgcgacccgcgtctgacgtatacactgatgacgaaaaatggtgatacgtatgacggcaaggtaagtgatgcatggtggtcctggaacagtccattccagttgtttatgcgtaaatatcagaatcagcctactacatgggctgccgataatcaggatatgtatgtcattcgctacgctgatgtactgttaatgcgtgctgaagctttggctaagcaaaatacgggtaaagacgaaattatgtcaatggtgaaccaggtgcgccagcgtgccgatgtgatgatgccgaaggtggaagatgctgaaggttccaatctctcttatgatcaattgctcgacgtggtgaagcatgaaagaagagtggaactggctttggaaggtacccgttattttgatcttatgcgctggaaagaaatggataaagcatatgaaagatgccgggcagacggtggggcaggttctcatatcttcgattcgtcaaaaggatatgtatggcctatacctcaatcagagttagacaacaacagagctttggttcaggcaccggaatggggtggtaaataattgaaataaattccagatagaggctggccggatgaagatcctgtctgaaggccggcctttgctctgctaaatataatgatatgagaagtatatacagcctattgtttttgttaataacgttgggattgagtagttgcagtgaaaagaaacccacccttcgggaacaatctttcgatgaggagtggttgttctatcgtggggatattgttgaaggtgagagatcagatttagatgactcacaatggcgtcaggtgaacctcccgcacgattggagtattgaagatatccctggaacaaattctccttttactgcagatgctgtcaccgaggtttcgggaggttttactgtgggtggaactggctggtatagaaaacatttctatgtggatgcagctgagaaagggagatgtattgctgtcgctttcgatggaatttatatgaatgcagacatttgggtaaatgatcgccatgtagccgatcatgtttatggatatactgcattcgagctggatataacagactatgtgcgatttggagaaaaaaatctgatagctgttcgtgtaaagaatgaaggtctgaactgtcgttggtatacaggttcggggatctacaggcatactttcttgaggataaccaatccgctgcattttgaaacttggggaacatttatcactacacctgttgccacagcaaataaagcggaggtacatgtacagagtattctggcaaatactgagaaagcaaacggaaaagtgattctggaaacgcagattgtagataaggagaatcgcactgtagcccggaaagagcaacaggtaacattggataacaaagaaaaaacagaggttggccatacattagaagtggcttctccgcaattatggtctacagacaccccctacttatatagagttgtaaaccgtcttctgcaagacaataaaataatagatgaagaatgtatttcaataggtatacgcaatattgcatttagcgcagagaatggtttccaactgaatggtaaatccatgaaactaaaaggcggatgtatccatcatgacaatggccttttgggtgcaaaggcttttgaccgggcagaggaaaggaaaatagaactactgaaagctgctggtttcaatgcgctgcgtttatcccacaatcccccttcaactgctttactcaatgcttgtgaccgcttaggtatgttggtgatagatgaggcttttgatatgtggcgacaaggtcattacaaggatgattacggacagtattttgataagttatggaaagaagatctgtatagcatggttgcgcgggatagaaatcacccttgtgtcataatgtggagtatcggcaacgaaatcaaagacaaagaaactgctgaagtggtagaggtatgcagggaattgacaggttttgtgaagacgcttgatacaacgcggcctgttacggcgggagttaattctattgttgatgcaacggatgattttctggctcctctggatgtttgtggttataattactgtttaaaccgttatgaatcggatgccaaacgtcacccggaccgcattatctatgcttcggagtcctacgcatcccaagcttatgattattggaaaggagtagaagatcattcatgggtgatcggtgattttatctggactgcttttgactatattggtgaggcaagtatcggctggtgtgggtatccgcttgataaacgtatttttccttggaatcatgccaattgtggtgatttgaatctttcgggcgaacgtcgtccccagtcctatttgcgtgaaacgttatggagtgatgcaccggtatcccatattgttgtgacgcctcctgttccttctttccctctgaatccggataaggcggattggagtgtatgggattttccggatgttgtggatcattggaatttcccgggatatgaggggaaaaagatgacagtatctgtatactccaattgtgaacaggttgaactgttcttgaatggggaatctttaggaaaacaagaaaatactgccgataagaaaaatacgcttgtctgggaagtaccttatgcccatggaatattgaaagccgtaagttataataaaggcggtgaagtgggcactgcaacgttggaaagtgccggtaaggttgaaaagatcagattatctgcggacagaacggaaatcgtagctgatggtaatgatctaagctatatcacattagaattggtagatagtaaaggcattagaaatcagttggctgaagaattggtagaattttctatagaaggagatgctacgattgaaggagtaggtaatgccaaccctatgagcatagaaagtttcgttgctaatagccggaagacgtggcgcggaagtaacttattggttgttcgttccgggaaatcttcaggacggattattgtaacagcaaaggtaaaggcactgccggttgcgagtattactataactcagaaaaaatagagactgcctaaaaatcaaatttaaaagaagtatgaaattgagagcattattaaaacgatctatatttgtcatcataagctcgttgattgtcacagcatgcagtcagggcacggattgttccgtacgaaagattaaatttgatcaggattggaagttccatcttggccaaatggaagatgcgacaaaagaatcttacgatgattcggagtggcgggtattaaatctgccacatgactggagtgtagagcctcttcctggttcggatggcttatcggtaggccctttctccaaagaaagtgccggaggttttgctaccggacaaaccgtaggtggtgaaggctggtatagaaaatcatttactattgaccgtaaagatgctcataaacttcattctctttattttgaaggagtctatgcgcagtccgaagtatgggtgaacggacaaaaagtgaatttcaatgcgtatggatattcgtccttcaaatgtgatattacttcatattgtcatccggcaggtgaagtgaacaccattgcggtgaaggtaacgaatgaggggaaaaattcccgttggtatgccggttcaggtatctaccggcatgtatggttcataaagaccgattctgtccatttggatgaatgggcggttgccgtacgtactgcaaagatggctggtgatgaggctacattggctatagaggcggatgtgcttaatgaaaagacggagaaagcaggagtaaatatgatggttacgattatttctcctgatggtgaagaggtaggaatgaaagagcagacagtgagtgttgacgcggctggtaagcagacagttgctttctctttgccggtgaaacaggcaaagctatggtcggttgatactccgcatttgtatgaagcgaaaattttaattcgttccgggcatgaagtgttggatcaaatatctgttccttttggcatccgtactatatccttcagtgcgaaggaaggatttaagttgaataatttgcctctgaaactgaaaggtggctgtgtacaccatgataatggtttgttgggggcggcttcgttggatagggcggaggcgcgtaaaatagaattgttgaaggcaaatggatataatgcagtcagatgtgcccataatcctccggcagaagcttttctccgagcttgcgatgaacaaggtatgttggtgattgatgaggcttttgatcattggcaaaaagaaaagaatcctcaagactatcatcgtttcttcgatgaatggaacgaaaaagatatttcggcaatggtgctgagagaccggaatcatccgtctgtcatcatgtggagtatcggaaatgaaattcaggaacgttcggatgatgccggtatagagattgctgaaagattaaggaatatagtgaagaaattggatccttcacgtccggtaactgctgctatcaacgattattgggataatccgcagctgaagtggaaggaagatgctgcaaaagccatgcaacatctggatgtggcaggatacaattatatgtggtacgaatatgaaaatgatcatcagaaagatcccttacgtatcatatatggtagtgagactgttgcacaggaagcggctgtaaactggaacctggtggaaaagcatccgtatatcattggtgattttgtatggacggcccttgattatctgggtgaagcgggaatagggcatacactggaactgagtaaaggcgagaagaatccacagtttatgggttggccctggtataacgcctggtgtggagatattgatatctgtggagagaagaaaccacagtcctattaccgggatattatctggaaggaaagggaaataacaatggctgtacagcctttgccggctgtcgggaaaacagaagatgtgagctattggggatggaagaacgaatctcttagctggaactggaaagggctggaaggcaaaccggtaaaagtaaatgtttatagtcgtgcacctaaggtaaggctctatcttaataatgaattgctgggtgagcaagaagtttcaaagaaagactatacggctacgttcatggtcaactatcagtcgggtgaattgaaagcagtggctacctatgacagcagtgaatcttcatgcgctattttaagaaccacaggtgctccggtacagatacgtttaatcgcagaccgcaaggtgattaaagcggatagggacgatctggcttatgttactgttgaattgattgataaagaaggcagggtagtacctgatgctgatatgaaagtgactttaagtgttgtggggaatggtattatcaggggatcaggaaatgcatgtcctacagatatggaaagtttccgctccttatcacctaaaacttttaaaggtaaagcaatggctatattgcaaccggatggaaatgcgggtgagataaccttgaatgtttcagcagaggggatgaaaggagcatcgattacaatcagaacggtggatcggatgtcggctaagcaagagggaaaagatatcgtgactcccggcagtatctggaaagatatggatggaaatccgataaatgcacatggaggaggtattctctaccatgaaggtacttattattggtatggtgaatttaaaggtgattccacctatcgcctggactgggttaaaacctgggagtgctggcgggctgaagccgggggggtggcttgctattcatccaagaatctgacagactggaaatttgagggtaaggttctgcctacggtagatgatgatccgacttcagatcttcacccttcgcaagtgatagagcgtccgaaggttatctataatgagaaaaccggtaagtttgtgatgtggatgcatattgaaagccctgattatgaaaaggcacatgccggggtagcggtctgcgactcaccgacaggaactttcacttatttgggatcttttaaaccgaatggggcagatagccgtgatcagactatcttcaaggatgatgatggaaaggcttatcatatctgctcgtcagaatggaacagtaccttatatatcagtttgctgactgatgattatacaaaaccttcaggaacttatgtccggagatttatcggacaatctcgggaagctcctgcggtctttaaacgaaacggtcattattatatgctctcatccggttgcaccggttgggatccgaataaagccaaatgggctgtatccgattcaatgatgggagtttgggaactgaaagataacccctgtctggggcgtgatgccgataagacattttatacccaaagtacctacgtactccccattgaagggatgcaggatcaatttatcgctatgtttgacaggtggaataaaacggatttaataaattcacggtatgtctggttgccgattgagttcgatggagacagaccacttattcgctgggcggatcagtggagcactcagacaatggaagcggtttattaacctaatgatagaatacaaatgaaaaaaatagcctgtttatttatcggtttttgcctgtttacgaacttatcagcacagaaagtttataggctggatgcttcggacgtcatggagacaccttcgtgtggtcatctgaagatgggaaatccggggcctaaggagaaagcaatagaagttaatagtctatatatgactatgggagggaagccaatcttacccgttatgggagagttgcatttctcgcgtatccgtaaggatttgtgggaagaccgtatcttgaaaatgaaagcttgcggtatcaatattatctctacttatttgttttggaatcatcacgaagagatagaaggtcagtttgagtgggagaatgagaaggatttgcgcagttttattaagttatgccggaagcatggattgtttgtagttccgagactgggaccctggtcgcatggagaagcgcgtaatggtgggacacccgactggatcttacaaaaaaaatatctgaaagaccgctcaaatgatgtggtttatcagaattatgtaaaacgttattttgcccaaatagctaaccagttgaaagggctttactataaagatggcgggaatatcataggcatccagttggaaaatgaatattggtatggaaaggagggtgaaccacatatccaatggctgaaagatacggctctggaaaatggcattgatgtcccgatgtatacggttacgggctggggagacggttcagttcctccttttgaggtaattcctttatggggaggatatgcagatgctccatgggtggaacatgtgggaaaagaataccagccgggaaacttcttgttcgattcgttccgtgataatgagaatataggtaacgatcagataaagcggcaagatgtgtatatgacgtacgaaaaatatcccttctttacttgtgaaatgggagtgggtgtacaaaatacctatcacaggcgactcagcatcgatcctttagacgggttgggtatgatgatagccaaacttggttcaggatctaacctgctgggatattatatttttgccggtgccactcagtttacgggtaaactatggtctactgaggaagagcaattgaaaactgggtattggagccgcttaccggtgaaatcttatgattttcaggctgctatccgcgaatcaggagaaatagcggaatcttataagaaggtgaaaaaactgcattactttgtcaatgagtatgaaaaagacctggctcccatgatgcctgttatcccgaagtgggaagaagatgggttacaagtagctgtacgctctaataatgaaaccggctatatgtttggaatcaattattcccgttatcatccgaagaaggtacaaaagagtgtgaagtttgaggtgaaactgaaagataaaacgcttcgtttccctcagaaaggtattgaaatgcaggatagtacggtctttatctggcccttgaatgtggaacttggtgctatgcgcctgaattatgccacggcacaattgatgggaagtgttgataattgctatctgtttttccagaacagacaaattccagtggagctatcttttgataaatcgactgtgaaaggagtggaggtaaaccgggctaagataaaggaagaaagtgatagttgggttgttagcggacttaatccgggaaaagattgtgtgcttaaaatacaattgcagaatggagaagaaaagtatgttgtcattctgactgaaaaagaggctgataactgttggttattggaacaagatgggaagaaagtatgctatatttctgatgcggatttatacagttcacttggagatgtttatattttctctactgataagaaggctgcttattataagttgaaaacgggtatgaatccgggatttgaacagaaagcggttattttcaatcagccgcaaatggatattcgtattcagtctaagggcatcctggaagaggctaaatggttggaaacagcaaactttcatgggattgaaccttatcagcagcgttatcgtcgtttcttctttaaggaattcaatctggataatccttcagagattaagaaagtcactttgtttatgtatccggagtcgaaatgtatactcaatctgaatgatacttgggtaaatcaggaagtaaaaccaaaccagttaaatgaaatagaccttacaggatatgccagaaaaggtgtgaatctgttgtttgcaagttttccatttgttgaggggaagaagcaatttgctgcacgtgtcattgtggaatactataattatgacaggattgaatttagtaccgactcttcctggttgacgacggactattattccaacccttcactcacacgggtgtttccgcaaccggtggctccggtggtagtagataaaccgggatatgccgaaggtattgcttataatacattcaaagagtggaggatacaagtgccgacagatgcattggagaatttgaataacatctatatgcgtatcaactattccggtgataaggcggaaatctataacggatatatgctttcagatgatgattataacagtcatgccacctggacagtaggtttgaaccgacaggaacattctgtagaggggaaagagttgacgcttgtgatttataaactggataaagacgagaaaatcttttttgacttaccggcaaacggaactgatgagcaggctgatgtgaaaaagattgaatttgattttgaatgtttacaaaagatagactgataaaatgaaacgattcaatattatcttatttcttctggctttggttgttttgacagttgaggcaaaggatttgcgggttgccggtattttcggtaataatatggtgttgcagcaaaagacgaccacaccgatatggggatgggcggatgccggggcaatagtcacagtgacttcatcatggaacgacaagagttattccgttaaagttgggaaagatggtacgtggagaataatgctgcatacaccggaagcaggaggtccctatatattaaccataacggaagataagactataactttcagcgatgtatatataggtgaggtttggttggcaagtgggcaatcaaatatggctatgcagctgaaagaatgttatgaatctaccaaagctattctggcttctcaaaaaagtaatattcgttttataaatgtgcctccacttggcagttataaaccgcttacggatataaaggcggattgggtggtggcagctccggaaaatgtaggagattgtagtgcggttgcatggtattttgctcattttattcaggagaatcttggagttccggttggtattattaatgccagttttggaggttccattgttgaaacttggatgagccgtgaaacttgtcagacattgggtgatatttctgttccggaagtgagcgatggtaccacagggtgggaggctaatatacctactaccatgtataatggaatgttgaatcctattgtcggttattgcatacaggggtgtatctggtatcagggagaatcaaatgtgtataatgtttctcaatattcgaatcggctggttgctatggtagctgaatggagacggaagtggggaagaaatttcccgttttatttcacgcaaataactccttttgattatgctacatggaatgttccaagtgaggtaggtgagcatgtaggtgcttatctgcgtgatgaacagagaaaaagcatggatcgaatcgagaatagtgggatggcggtcattttggatgtaggggaagtagagcagatacatccggtacgcaaagagaaagtcggcgaacgtttaggattgatggcattagctgaagtgtataatatgaagggatttgaatataagagtccggtttttgaaaggatggaagtcgatgatgataaagctgtgatctattttaaagatttatattatggactaacgagttatggaaaacctctgcatttatttgaaatagcagatgagagtaaggtttttcatccggcggaagcgtatgtagatgaagaaagagatgttgtagtagtatcttctaaatatgtgaggaagccgaaagctgttagatatgcctttaaaaattatgtagaaccggaattattcagccttagtggccttccggtatcttctttccggacagataattggtaataataaacttaaaaataatatgtatatgaaaaatataaagacaatactatgtggaggtttggttgcaatgttagtttcctgctctccacaggtgacaacgactaattattattttgattctgtaaatggtgacgatgctaataacggaacttctgtacgaactccttttaagtctttggcaaagcttcagtctttaactctaaaaggtggagacagcattttgttgaaatccggtgctgtatttacggagaaacttttgctttcctgttgtggagaggagaataatcctgttgtattgggcaaatatggaggactggaaaaaccgcatatcaaaggaaatggagttgatacggccgctgttcatatattgaattcagagaatctggtgatacgtgatctggagatttctaataaaggtgatgccccgaaagccggtttgctggggctatgggttgaattggataagtttggagaatcacataatatggtcattgatgacttgtatgtgcatgatgtatatggaagtacggtgatagagaaaggtggtggcattggaatttgtattcagaatggccgggataatgatagtattctgaatagatttgttggaatgactattgaaaattgctatctgaaagattgtcaaagggatggaattaagtttaagggatactggatcaggaaacaatggaagcctaatttgggagtggtcatcaggaagaatgtattggatggagtgccgggtgacggtattgtactggctggttgtgatggtgggttgatagaatataacgtgatgaagaattgcccgaaaacgttgcccgaatccgaagcttgcgatggaatatggccttggtgtagcgataatacagtggtacaatttaatgtagtaagtgatcacaaatctatcatagacgggtatgcttatgattcggactggggatgtcggaattcggtattccagtataatctgagttataataatgatggcggcttcatgttggtaattggtacggatggttggcctgaaggctggtgtgtgaatggtaatattgaaacaaaagtacgttacaatgtcagtataaatgatggactacgcaattatctgactaatgcaagccataaagatgcttattttagccctgcaatgcatttcaccggatatactcagaacacattggtagagaataatctgttttacctgtttcctaaaccggagccgcagatagaccgtacacttttccatttcaccaagcatgattcatcttatgggaaaggagatgtcttcaagaacaattatatttatgctccggaggtgactgtagctgtaaaagaagaaaaggcagtgggtaaccaatattccggaaatgtatatgtcggtagtttgaaaacccctgccaccggttttacaaaacaggatggatttttcaataaatcactttggtataatgcggaagataagaattgggatattcttcttgatttcttgaaggataaaactgtacctgtcaatggtaaagaactgaaagtacttgatatcatcggggcgaattaaaatagaatcttaaatcattaaaatactttagatatgaatttattcagattatgtgtagcaaatctagtggcattattctgggtggtgattcctactgccatgggtgccaatattatacctcagccttcttatatacaagagaagcaaggtacgttcgatttagctcataacaataatattctttatgtcggtaaacagccggaagtaaatcagataattgataactttatggagcagatgttgggagactatggtttgagtttgcaaacaaataagtctaaaaaggccggcatattactgcaagataaaaagtccctgggtgaagaagcgtatgaactttctgttgctgccaataaagtggtaattaaggcatctacacctgccggatttttttatgctctccgcactgttaaccagttgattctggcggatgaaaatcatacttcacttccttgtatccttgtgaaagatgcacctcgtttttcttaccggggattcttgattgatgcgggacgctattatttacctttgaaagatgtgaaaaaggctattgatctggcagctaattataagttgaatcgttttcactggcatctgactgatgatcagggatggcggttagagataaaaaaatatccgcgtcttactgaaaaaggctctgtacgctctaattcggctattggcacttgggatcaatattatcctcgtcattatgatggaaaagaacattcaggatactatacacaagatgaaattcgtgatattgtgagatatgcagctgacaggcaaattacgattgttcctgagattgaaatgccggggcatgccttggcggctttgagtgcttatccggaatatgcatgcagttttcattcttcacttgatttgatggcaggagctggcatttctgaccaggtgtattgtcccaaacctcagacattccggtttataaaggatatccttacagaagttgcaagcttgtttcccggagaatatattcatattggcggtgatgaatgccctaaaacatcctgggaacaatgtgaggattgtcaggccttgataaggaaagaaaatctgaaagacgagtttgaacttcatgcttattttattcagcaggttgagaagattgcggaaggtcttggacgaaagctaattggttgggatgaggtgttggaagggggacttcctctgaaagctacggtaatgtcgtggagaggggaagcaggaggcataaaggcagctcaattgggtaataatgtgattatgacccctaatacttattgttatctggattattatcaggagaatccggaatttgctcctttagctatcggtggatttatatcattggaacaggtatatgattacgaacctattccggaggcacttactgcggaagaagctaagcatataatggggattcagggaaatatatggggagaatatgtcgctactattgagaaatttgaatatatggcatttccccgcctgcttgccattgcagaagtagcttggagccagcctgagaataaaaaccgggaactgtttatttctcgtctgaagaaagagttttcttttttccggaaaaggaatgtcaatacatgccgtgaatatttcagacctcgtattcagggaggttgggatggtgagaaaggaatgtatgcggttacacttgagactatatgccctgatgttgatattcgctacacattggatggttcggaacctacggtagaatcggatatctataaaggtccggtttatttgactgagaatacttgtgtgaaggctgtggtgacagataaagataatcagatattggaagctccgacggttaagaactttctggtgaataaagcaacgggatgtacctatacactttcgaccgatgcctggagtttagattggtatccggtaaagcctactctgtttacggatggtgtgcaaggttttactccttcaaattacgagtgggctgctatcgcttccggcgtagagattgtgattgatctgaaaaagaatacgacagtatccggagttcgcttcggtactatggttgctcctataaacagtacacttccggctaagtctatgatatgctatctttcaaaagatggtaaggaattccggcagataggagaaagcaccttctcatatcctgtatacaaaggagagaaagagatctatcacaattatgtgaagacggacaagaaagacggacgatacttgaagcttgtgataaacgggcaaactgagttacccgaaggttacccttatccgaatgctttgccttcgattgcattagatgaaatagaagttttctaataagaagtgtggttatgaataaattgttatttttgtctatactgctattaacttgtgtaacaggttgggctaacggtatacgaaatttttatgtggattcttttagcgatagtcaagttgctgatggtagtatggaatctccatttaaaagtctggatgctttgaaaggtattaaatttttgccgggtgattgtattcatctggcagggaatcagatattgaccggaattattcatgttaagggggtaaaggcgacgtctgagaatccgcttactatcacttcatacgggacgggagtttcacatatttattctgcccatagttctgccattgtaatagatgcctgtgagaatattcatgtaaagaatgtagtggtgaaaggttcggggcgtaaaaagggcaatacggggacaggcatagaggtgattaattcgaggtttatagaggttgatagagtggaagcttccgggtatcaaatgaatggcattgggataactggtggaggcgatgtgcgcataactcattcgtacgtacatgataatggttataacggtattgaagtgacaggtaaatggggaacaaaatctgtacataatatttatataggccattgtgtggccgaaaataatgccggaaatccagctattctggacaatcatagcggaagtgggatattggtaggccatgtaaccaatgcaacaatagagtattgtgaggctatggggaatgggtgggatatgccgaggcccgggaatggaccggttggaatctggggatacgaatcagatcgtttgactattcaatattgtttctcgcatgacaacaagacttctccggaaggattagacggaggtggatttgattttgatggaggaatcacgaattcattaatgcagtataatcttgcaatgaataatgagggagccggttatggcttgtttcagtttggcggtgcaacggaatggaataataatatagtacgttataatgtgagtattaatgacgggattaagaattctcatgcgggtatctatgtttggtgtgatccgtataataaagatgttcctttatgtgaaactaaggtacacgataatctaattatcagtaatcaggggtattctatctcttttaacaccggattttcttcgggactggaatttgcgaacaatacatttattctgactaatggaggagtagaacatttgcatggagatgaaacgaaagaaatggcgatttataaaggtaatcgattttggtctgaaacagccggacaaaaaggagaacgacagcctcgggtacctcaggatgcaacagcaaactatgaggcggttggatataatcttcctgtaagtgtagatatacttcggctgaaagaaattataactgatatgatacccctaaaaaaatgagggctatgtataaaagaagtcttttctggtggacactgcttagttttataagtggttattgttaccgggcaaatgcacagtctgcatatcagattaatttggatataccggataaaataatagaaactggttatttggatttgggtggagtggctcctgacggaggttctatatctgtaaatagttattatatggaattgaatgagtctccttttatccctattatgggagagatacattatacccgtattccaaatgaacaatgggaagaacagatactgaaggttaagtcgggaggagtgaatgttatttgcacttatgttttctggaatattcacgaggaaacagaaggtgtttttgattgggacggtgataaggatcttcggaaatttatctctctttgtcagaagcataatatgaaaacgctcgttcgtataggacctttctgtcacggagaaatcagaaatgggggtataccggattggctttatgggcgtccgttcttgattcgtaccaatgaccgggagtatctgaaatatgtagatcggctttatgctgaaattgcttctcaactggagggatttttccataaagatggtggttgtattattggtattcagttggaaaatgagttgcagcactctgctgctccttgggccattcgctatcctgatcagccaattgactatactgttgctgattatgatgtgcaaaataccaaatttggtgtatcggtacaagaacaggatatccagagtcctgaagccggtaatcagcacatgaaaacgttgaaagaaatagcactgtctcatgggatggaagttccgttgtatacggctacagggtggggcaatgctgcgatcattcctcaggaagttattcctgtaacggcggcttatacttatccgacatgggcggatataggtatgtctccattctatttattcagggatattcacactactcccgattattctccggtacgatatgaaggataccgatatccttctttttgtgcagaaatgggagtcggtattcagatgacttatggcagaaggccacgcattccggccgaagcaggtgaaggattaatggtacgttcgttaggaagtggcgccaatggcataggctattatatgtatcatggcggaattactcctcagggaaaaaggggtttctttagtgatgaaccttcaggggtgccaaagatgtcttatgattttcaagctcctatcggagaattcggacatacgcgcgcttcttatcattcattacgcattattcatcattttgtaaatgatttcggtcatttgttggcacctatgggagtggtgttgccggaacacagtgatacgattactccttcaaatactcatacccttcgatatgcagtgcgtaaaaaagaaaatgctggatttgtttttattacgaacttccaggatcattgtaaacgagaagatctgagagatatcagtcttactttgaaactggccagtgaaacggttcgttttccacaggatggaaccgtaacggtagtgaagaatgccaatataattcttccttttaatatggatttagatggtatcttattgaagtcggctaccttgcaaccgctggcaagaattacttccggaggaaagaaacattatttcttttttgcacccgaaggaatgaagccggagtatatattcgcagagaatacggtgaaaggagggactaaaaagttgattccagtgcctggacttaacagtacggtaagactaaaatctatagcaggaaaagagattcttattacaactttaactcgggagcaagccttagcggcttgtaaagtgacggtgggaaaggaggagaaattactgataacttccgcagatgtgctgcaagaagatgctaaagtacggattcaatctacggatactatattaaaggctgttgcttttcctacggttcgttttataactgaaacttctgcgaagatcaataaaaagaagtattacagtgagatatcatttaccaaggaaggggtacacatttctcccgaagtctatatggcgagtgagaggcgttttcaggttcatttgccggaaggtgctttcagagatgtgagtgatcttattctttctattgattatattggagatacaggtgctgcatttattaatggagagatggtagcggataatttttatcatggaagcccgtggcggatagggttgaagcgatatgctgaggctattcagaacgatggtatttatttttatttgcaacaattgtttgctgatgctacttacctgcaagatttacctgaagggcttaggctggatttctcaaaaggaggggtatgccaactgaataagatacaggttatccctgaatattatgcaacttttactattggagattaaaaagaataaaaaatgaaacaaatcgatttttacctgaagtttgtaattctaatattgggtgtgaacgcctcttctattgtctgtttagctcaagaggcatttcccgtgacctgcaaggaatataatgaaataattctgactcatgtgctaactcctgcagggcctgttccgactgctatggatgctgacgggatttatccgtatattagttatagtgagacttccaatcggccgattcctaaaacttatcgaatgatttcacttgaaaatgaatttgttaaagttgtaatttgtccggacttatgtggtaaggtgatgtcgatgatacataaagggagcggtaaagaggttttgtataatccacatctcgtacgtcacacacgtattctgccacgtttctattttgtggccggcggtatagaagtaagcttccctatttcacatacccctactcagaatgaggcggtttgttataagatagaccggaccgctgaccggatttatgttacttgtggtgagcgggagatgcgttacggcatgcagttctctgttgaatattctttgggaacaggagatcactttctgacacaacgtgtcagaatacataatccgggtacaaatgcctatccttggatgtcgtggacaaatgctgctattccttgcatgcctgatactgaatatagctttccgcaaggagaagtattggtacatgcttctgcattagatacaataaactggaaaaaaaagggacctaaaaaagaaaaagatatatcagaaatgaccggatatttctggaagacgaaagatgtaaacgcttttggtgcttatactccttcattgggatatgggctttatcatattgcagaggaacaaagtgcaccgggaataaaattatggagttatggagtgaaagaagataaagagtggtcattgctcagtacaaataataggcagacttatgcagagctgcaaggaggacctatcagcgaccagtctataaagctggaattgcagccgggtgaatatagggagcatactgagttctggatacctgctgataaacgaatggacatttataaactttctgtgccggaagttgcattgcgtccaatagaagaactgccgttattcggttgggcaagagagagtgagattgctccttggattgcattgcttaatgcttttgagtatggaacgaatattcctcaaatagatccgactatcactttttgggcaccttccgggatggaaaatcttgatgatgcttttcaatgggctattataaaatgcaataaagatcagcaagattattggaagtattattacggtgcatggttggccgggcgtgaaaggagtaaagaggctattgcttgtttaagtagtgtaaaattggggttggcacaggctttattggcaagattgtatgaagtaaataaagaatataccaaagcggaagcagcttatggtgccataagcgaagaatgggtggcattgcatccgcaggtggttgtggctcgtgataaattgttgcgtcagttggggagtaggactcttgctaaacgcgaggaatggctgagtaaagttgatgcgtctgcagatgaatggattgccgaaaggcgggtacaactgcttattgataaaaaacaatataaggctgctaaagatttgttgttgtctattaaatttcagaaagtacatcaaacttataatcgtacggatatgtggcatcaaatatgcaaggctttaggagagtcttcatatataactccggataatttaggtgaagaccgcttagcgcgttttggagcatatcgggaatttgaataatcaattctataaattaagctataaaaccatgaaaaagaatttactgataacagtaactttagttctgtctttatttacttcttgtgcccataaaatgggtgatgcgatagctattacagtatatacggatagtattgtcagtgatatctcaaatcatccggtaggaattaatctgaattttataatggatggcgggcgttttcccaaggcaaagaagaatgtaacagaagcagtaaaagaattaggaacaaaatatctacgatatccgggaggtgagaagtcggatttatatcttttcagcataccgccttatgaagaatcacatacttcattggcgagaacaattggtttggatgattatcccggagtttttaaagatggagagtttgtttatgaccctttggatttcgatgaattcatgaaagtttgtcgggatgttggcgctgaacctgtattggttgttgctgctgataattatttgcgtaaacctgaaaaaggagaaagagtctccggtcgggaggcattaattaaacatgctgctgaatgggtgaggtatgccaacattaagaaaaagtacaatgtgcgttattggatgataggtaatgagagttggaataagaataatgagaactccactgttgatatctatgctcaggatgttattgacttttcaaaagccatgaaggcagtagatccctctatcttagttattccaaatggcgataatgatgaattctttaaagcggttataaccaaggctggggactatattgatcgtttatgcgtgagtaactatggcatttttaattttaatgccggatatgaaagctataaagatactgctcgttgtctgatatggcctgcgcaaacagcactcaatgctatgaataagtacgccacaccggaacaactcagtaagtggaaattgatagttgctgaatatggaacaattgattgggccggactttggcatggaactaatgatatggggcatgctattgtgaattttgatatgaccggtcaattactgttagaacctcagatagagttttcttgtttctggaatacccgttggctgaataatgaagaacagcctcagacagatcacgacgctattgattcaaatgggaatatcaatcctacagggtattcattgctgatttggaataagtttatgggcgataaaatgataaagtccgaatcaaaagggtatattatatcttatgcgagttattctccacaaaaggatcaattgtttgtgtaccttattaataaaggcgacagggaagagagtgtgaatattgttattcccggtaagggtgatgctaaagtagttcaatgctgggaatatttcggtaaggatgataaggatttggctcctgtgtggcaacaaagagatgtgaaagataaagatataactttgaagaagtattcaataacagttatagaatataaattgacggagggataatagtacttgaattgatacattgtagtataagggacgcttatcaggaatactgataggcgacccttatgtgttatttagacaaactgattatgaggcgtatttaggtggtaatttctcctgccatcggagtacgcattctttttcgtacctcatcaggcgtataaccgtggcccagtagaaacatcagtttagtaacggcagactccgttgtactatcatatccgcaaactactcccgcctgcattaattgatagcccgtttcataacgttccatttctacggttccggcactacactgggtgacgttgacgatgactatcccttgctcgcaagcattccgcaaacggcgtatgaaccactccttgcggggagcatttcccgaaccgtaagtttcgagcacgacagctttcaatccctcaatgctcaatatacttgatactacattctcctgaatacccggaaagagttttaggacagcaacattggtatctaaaagataatgtggcttcagttcccgttcaacttccttaaagcggatttgcacattattatatttaatatgaatacctgcttctgccaatacgggatagttgaatgaacggaatgcattgaagttctctgcattcatcttgatggtacgattgccgcgcatcaggtgattctcaaaaaagatgcagacttcgggtacaagcggattgccttttgcatcacgtgcactggctatttcaagactggtaagaaggttttcttttccgtccgtgcggagtactccgatagggagttgtgagccggtgaggatgacaggtttgctcaacccttctaacataaagctaagggcagatgcggtatatgccatcgtatccgtgccgtgcagaattacaaaacctgtgtatctatcgtaatggtcactaatgatatgtaccagtttgcgccaagcttccgggtccatatccgaagagtccatcggaggatcgaactggtaagtatcgatatggaatgtgaaattttgcagttccggtacgtgctttttcagctgctcgagattgaaattctctaaagcacccgtttcggggttttctatcattccgatggttccaccggtatagattagcaaaatggaagttatatttggactcatatgcattctcttacgataatttagtgcaaatataatgatatatcttggatttaatatcaaaatgttataaaactgtgccgctgatagtggaatattgtatggttatgtgtgaaaatgacacttcgctcttttgcatatttctgcctcttttgaggcctttctatatttttattacaaaaaaaccacaaaatgtgatagattgaatgtttttattattacttttgcgacacttatcaataatgaaagaaacagagagtatgaacaagtactatcaacatacagtcacatccatgtgcatgaccatgacccttaggggttaatggatagtatttgtgtttctacgtgttacactatttttcagcagtttttcttatttaattcaagtcaatacaggtatatacgtcctgtttccgacacattgtatcaaccttatcaatagtaataaaggatatgaaagtaataaaattcggcggaacgtccgtaggttccgcgaacagtattttgagcgtaaagagaattgtagaagcagtagaagaaccggtaattgtggtggtttccgcgctggggggcatcacagacaagctgataaacacgtcgaaaatggcggctgccggtgatgctgcttacgaaaatgagtttcgcgaaattgtttaccgccatgtggaaatgattaaagaagtgattcctgctggtgaggggcaagtggaactgcaacgccagatcggtgaattgctcaatgaactgaaagatattttccagggtatttatctgataaaggacctttcgcaaaagacctccgatacgattgtcagctatggcgagcgtttatcatccattatcgttgcagagttgacaggagccgaatggtttgattcacgcaagttcatcaaaactgaaaagaagcactccaagtatgtattggataccgagttgacgaatgaattgattcgtgaaacattcagcactttgccgaagcgtgcgttggttccgggtttcatctctactgataaggtgacgggagatgttacgaacctgggtcgtggtggttccgattatacagcttcggttattgcggcggcattggatgccgaccaattggaaatctggacggatgtggatggtttcatgactgcagatccgcgtgtgatttctaccgcttataccattaacgaactgagttatgtagaggcaacggagctttgtaacttcggtgccaaggtagtatatccgccgactatttatccggtttgccacaagaatattcctattttaataaagaatacattcaatcccgaaggaacgggaacgattatcagacaggaagtatccgatccgcgtacgaaagcgattaagggtatttcttctatcaatgataccagtctgattactgtgcagggtttgggtatggtaggtgtgattggtgtgaactaccgcatctttaaggcactggcaaagaatggtatcagtgtgttccttgtatctcaggcatcttcggagaattctacctctatcggtgtgcgtaatgcggatgccgatctggcatgtgaagtgctgaacgaggagtttgccaaagagattgaaatgggtgagatttctccgatacaggcggagaagaacctggctacggtagctattgtaggtgaaaatatgaagcatacgccgggtattgccggaaagctgttcggtacgttgggacgtaacggtatcaatgtgatagcttgtgctcagggtgcttcggaaacaaatatctcatttgttgtggattccaaatcattgcgtaaatcattgaacgttatccacgattcattcttcctgtcggaataccaggtgctgaacctctttatttgcggtatcggtacggtaggcggtagcctggtggaacaaatccgttgccaacagcagaagttgatgatggagaatggattgaagctacatattgtgggtatcgctgatgctgaccgggctatgtttagccgtgaaggcttcgacctgacagattttcgtgcagaactggcagagaagggtaaaccgagcacgctggaaactttacgtgacgagattatcggcatgaatatcttcaactcggtatttgtagactgtacggcaagtgtggcagttgcttccttgtacaaagacttgttgttacacaacgtttctgtagtggctgccaataagattgccgcttcttcggaatatgagaactaccgtgaattgaaacagattgcccgccagcgtggtgtgaagtacctttttgaaacgaatgtgggtgcaggacttccgattatcaatacgatcaatgatcttatccatagcggtgacaagatattgaagattgaagctgtactgagtggtacactgaattatatctttaataagatcagtgcggatattcctttcagcaagaccattaagatggcgcaggaagagcgttactccgaaccggatccgcgtatcgacctgagtggcaaggacgttatccgtaaactggtgatcctggcacgtgaagccggttacagactggaacagtcggatgtagaaaagaacctgttcgtacccgatgatttctttgaaggttcgctggatgatttctggaagaaagtgccgagcctggatgcggacttcgaagcccgtcgcaaggtgctggaagctgagaacaagcactggcgttttgttgctaaactggagaatggcaaagcatcagtcggcctgcaagaagtgggtgtaaatcatccgttctatggtttggaaggtagtaataatatcattctgctgactacagaacgttataaagaatatccgatgatgatacaaggatacggtgccggtgccggagtgacggcggcaggtgtatttgcggatatcatgagtattgcaaatgtttaataaaatgaaacatataatcatattaggcgatggaatggcggattggcctgtggagtcattgggcggtaagacgctgatgcaatatgccaagacgccttatatggataaactggcgagcatggggcgtacggggcggttgaagactgttgccgatggtttccatcccggtagtgaggtagcgaatatgtccgttctgggctatgacctgccgaaagtttatgaaggacgaggacctctggaagctgccagcatcggtgtagatctgaaaccgggcgagatggcaatgcgttgtaacatcatttgcattgaaggcgatcatattaaaaaccattctgccggacacatcacaacggaagaagccgatgtattggtgaagtacttacaggaacatctgggcaatgagcgggtgtgtttctatacaggcgtgcaatatcgtcatttattggtgatcaaaggtggagataaacgtatcgattgtacgccaccgcacgatgtgccgttgaaacctttccgtccgttgctggtgaaaccgatgccgggtacggagaatataacagttcccgaaggcggtgcagaactgactccgcaacaaaccgctgatttgattaatgatcttatcctgcgttcgcaggagcttttggaaaatcatccgttgaatcagaagcggatggcggaagggaaagacccggctaacagtatttggccctggagtcccggatatcgtcctaagatggaacgtttgtctgataagttcccacaagtgaaacggggggcagtgatttctgctgtagatctgatcaatggtatcggatattatgcggacttgcgtcgcctgacagtggaaggtgcaacgggcctgtatgatactaattatgaaaataaagtggctgctgcattggaagccctgaagacggatgatttcgtctatctacatatcgaggccagcgatgaggccggacatgaagggaatgtggatttaaaacttctgacgatcgagaatctggatagccgtgctgtaggtcctatatatgaagccgtgaaagattgggaggaaccggtagctattgccgtattgcccgatcatcctactccatgtgagctccgtacacataccaatgaaccgatccctttcttcatctggtatccgggtatcgaaccggatagtgtacagacctttgatgaagtgtctgtttgcgaaggtagttacggattattgaaggaagatgagtttattaatgaatttatgaaaagctgattatgaaatattacagtaccaacaaacaagctcccgatgccagcctggaagaagccgtagtgaagggacttgctgccgacaaaggacttttcatgccatatagtattaaacctttgccacaagatttttatgatagtatcgatactctttcctttcaggagattgcctatcgcgtagccgacgctttctttggggaagatgtacctgccgaaacattgaaacaaatcgtttacgatacattgaattttgatgttcctttggtgaaggtggcggaagatatttattcactcgaacttttccatggcccgacgcttgctttcaaagatgtgggcgggcgtttcatggcccgtcttttaggatatttcatcagaaaagaaggtaagaaacaagtcaatgtgttggttgctacctctggtgatacgggaagtgcggtagctaatggtttcctcggtgtggagggtattcatgtatatgtgctttatcctaaagggaaagtcagcgaaatacaggagaaacaatttacgactctcggacagaatatcacagcccttgagatagacggtacattcgatgattgccaggcgttggtgaagtctgcttttatggataaggaactgaatgagcatctgcaacttaccagtgcgaattccattaatgtagcacgcttcttaccacaggctttctattacttctatgcttatgctcaactgaagaagttaggcaaggcgaacgatgccgttatctgtgttccgagcggtaattttggaaatatcactgccggattgtttggtaaacgtatgggattgcctgtgaagcgtttcattgctgccaataaccgtaacgatatcttctatcaatatttgcaaaccggagtttatactccacgtccttctatcgctaccattgccaatgctatggatgtgggcgatccgagcaactttgcgcgtgtgctcgatctttatggaggcagtcatgcggccatttctgctgaaatcagtggtactacttataccaatgaacagattgccgaaacgatgcgtgaaacgtggaaggaatgtcattacctgcttgatccacatggagcctgtggtttccgtgctctgaaagaaggactgaaaccaggtgaaactggtgttttcctggagacggcgcatccggcaaaattcctcgaaaccgtggaagatattatcggcgaaaccgtagagattcctgcgaaactgaaagcttttatgcaaggtgaaaagcaaagtctgtcgatgacaaaggaatttgctgattttaaaagttatctattgtcgctataagaagcggaatttctttaagcggaaagaaataaagacccgaaagcttgactttggtgtttcaatatagtatatttgtaaccgtaattttaactcagattcaagtttaaattagcataaggaggttgtgtcaaaatgctggcacaccctctttttatgcgcaaagcccagactttctcaagcccgggctttgttattacccaaaatttttgtaactttaggcataaagtttttcgttatggcaaagttacattttcgtccttacattcccaaccaaaccgttctttttccacaaagaattgatgaaaacatagctgcggacgatcctgtccgcatagtcaatgcagttgttgataatcttaatcttgataatttcaagaagctttataaagaagcggggcgctcagcttatcatcctaaaatgatgcttaaggtaattatctacgcttacatgaataatatctattcctgccgtaaaatagagaagcttcttttgcgtgatatccattatatctggcttgccggtcatgagcatccggatttcataaccatcaaccgtttccgtaaccgtgtaaaggaggagataaacaacgtcttcacgcagttggttcttgtcctagctgacaagggtttcatcagtcttgacgtagagtatatcgacggcaccaagattgagtccaaggccaacaaatatacttttgtctggcgcaaaacagtcgaaaagaaccgtacaaggttgctgaataagattcgcatccttctggagcaggtggatgaagccattgtgcaggagaactctgtaaaagacacatccgtggagttgactcccgccatgctctctaatatagtggatgaactcaaagaagtgctggaacaccagcctgcaacacaggacaaggaacaaaagaaagctctgcgtgaaaaaaagaaacaggtcagagaacttgaagggtatcgtgacaagctgatggaatacgacaatcaccttgaagtccttggagaacgtaattcctattccaagaccgatcctgatgccacattcatgcgtatgaaagaagacgccatgaagaacgggcagaccaagcccgggtataatttacaaacaggcactgaaaaccagttcatcatagacttccggctgtttcccaaccccaccgatacgctgaccctgatccctttcttccactccttccagcaccgctataaccgcttaccgggtatcggtgtggcagactccggttacggctcggaagaaaattaccggttcatgcaggaaaacgggatagaggcctttgtcaagtacaactacttccataaagagcagcgtccccgttatactcccaacccgttccatgcggaaagtctccattacaatgcgggggaggattattacgtttgtacgatggggcaacacatgaaccgcataggaaccagacgtgacaaaacagcgagcggatacatcaccgaaagtgcccggtacaaagcacaaagatgcgaaggctgtcctttgcgtggaagttgttttaaagcacaggggaaccgtattatagaagtcaaccaccggttaaaccaatataaacggcaggcacgggaaaggttactctcagaagaaggaatcaggcatagaggcaggcggtgtatagaaccggaagctgttttcggacaaatgaaatacaacatggcatacaggaggttccggcatgtgggagaagacaaggtgacaatggactttgccttctttgccatagcttttaatatcaaaaagatgtgtgcaagactgagaaaagcaggaaaggagttcattacacttgctaaatctatatttattgggctatttataactcgatacaacgggaatatagcaacttgttaccaaatgaatgagaaaaaagcggcgtagacaaaaggaaatatagcaggactgtaaatcatcaaaaaaggttgtgccaacgttttgacacaacctcctctttttttatcccatctgaaatgccacatttgatcttcccgaatgccacatcttaatgactgaaatgccacactctaacaggcaaatagtgtggcatttacccgattgaagtgtggcatttgcctcattcaactgtgggaaacacaccatctacttgtggcaaaggcatcatctgtttgcatgaaatacatgatgcgtttgggagattcagaccatctgtttcagagatatgctactaaggacaacagtgataaaccacttgccagagttaagaatgcataaatctgctcttgacaaaaaatcagtaactactcaaggataatattattataacatgaaaaaaggcctctgctaactatgttggattgtttttttatacctttgtacccatatttattaatattgcgaacaaggagttgaaatagacttataatggaaaaggaatgaataagactcaccacagattacacagattcacacagatttattaatctaataatcagtaaaatagaatctgtgtcaatctgtgtaatctgtggtgaattaattcataaccgaaaagaaaggcatttattcaatttctggttcgcattaaccataaacaagataaaaacatgtttgtatcgtcaatgtcgtccgaagagttatgtgctgaagcaatgaaagatttttcaatattgcagaccaaaatcgatttatttatggatcgttgtggaaagcgctacaggcaagaacactttatcggaagatttattaaaagaatggtagtcacaacaaagcggaacaattcttggaccattgcctttcttgctctcaatgaaggttttacatttcttatttacgctccgataaccggtcaggaaacttgtggatatattgcattatcgagcaatagaaatcctcttgttctggagtatactccacattttatgcagagatacagagaacgttaccttaagtattataatctggacactggtaattataatgcattagagtattttagcttgaaaaataataatactctttatgtcaggcaacctgataattcatactattttatatcagagcaaggtgtcatgattggcagactggtgtcagaacgcatgataagtcacaaaacctatatcggagatgataacctgtctctccgtaaaaggattattcttgatgaagaatataaaactctttgtgcggcaaatacacttctccgtttgcctgataatttgaatttagagacagtgcgtaatgttgccagtcgatacaacttgggtgatgagttcacacaaagatggtatgcatggcatgcgatggaatttgttcaatcataatccgttacttttttacatctcattcctttttagggattaccttcagttcccccatttttagtcggttgtcccatagtacaacaacttctattttcttgaggctatgtcgatagaaaagtgtatatcccgggtgaggaatgatgtagcgtatattttctacttctgttgtttgtccgatgaacggattcatgctgatgcggtgtaatatgttctgtaattgtacatagagcacttcaccaacctcattattcccattctttagttttagtatctggaatgcttccttcaactgtttcttggcgacgagcgaccatattacttgcttagccattctgctacctccttgtttattgttaagttattttgtccttcgcggttatccaattggcagcaggcagtttcaacttcccggcgcagttgatgagagaatacgagcacttgttctttgctcttaggttcatcttgcgtttcggtacgcagtgtgtctttttcttctttacttttcatagggctatccttttttgtttttcatagaacatcctaaagatacgaatagttttggaatatccatgcacgttgaacaattttcttctccctgcgttctctgccttgaaaccaaaattgtgatatccgaatgaaagataagaagctggaggccaatttaagtttggtagtctcgcgaatatttgcgggattgaatatgaatgccctgaaattcctgctgcccgtgtggatgggtgcattgacgggtgtcacggtgcgttgtacttttgctgctatagcgttctgggtgacaggctggtttgtgaaagaagcacctatcacacggcggcagcgtatcgggttactttgcctgggggcattcggcatgtatggttttatgttctgctatttgctgggtatcagtaaaacgacacccgtcagtagtgccatattcaattccctacaacctatctgggtatttcttatctccgttctctttctgcacgaacgggctacactgatgaaaattatcggtatttcccttggtttcggtggtgcattgctgtgtatattgactcaaggcagcgatgacttggcacatgatgcctttacaggtaatatgttgtgcctgctcagttcggtgttctttgccatttatctgattctgagtaagaaattactggaagagatcggcttggtgaccgtaatgaaatatgtgtttgggggcgcggcgctgtccggtctggtgatatctactatcctgggctgggacgcgccgttgttcaccgacgcagcacatggaacctggcattggatgccgtgggtggttctggcattcatccttatttttcctacttaccttagttattggttgatgcccatcggattgaaatatctgaagacaaccgtagtagccatgtatggctatctgatactgattgtgacgaccgtcgtttcttatatcgtgggacaagaccgctttacctgggaacagggggtggctatcgggatgatatgtctgagtgtgtactttgtggaggtagctgagaggagaaaatgaactaatagtttatcactaccaagtattccccttctgcgtgaatggtgaattctgtttccgtgctttcgttcagtgtaccttgccaccagttggtgaagtcactgagagggtataccaagccttcgcctcgcaggttgtgggcaccaaagtttatgattgaaatctgttgccccgcctggctgggaaaagaacaggtatcatggcagggaatgaaaataccataatcggtcagcatgcggacatgagctccggtacgcatataatcaatgagcaggctgatatttcctaaagtatggtcttcccgtttgcctgtggctcctacgatagcgatattttttttgccttgtgataaaaggaagtttacggctttggtctggtcgttggtttcctggtcggagacgcaatgaagaatatggctatatttccggcggttttcttcactcagggaatctccgtcaccgataataacatcaggtacattgccgcgatctatataagcatctgcaccgccatcacaacaaatgatataaggagcgtttgccagtatttgcaaaggtataggatgggttggataatcaccattggctaagattactgcttccggttcaccacagagaacacagagttccactgaattcttattattattttctttcatcattgtttcttttatcaccttatcactctaccactctttccatcatcctcttccatttgaagtagccaaagatagcgattattgtataaagagcatacagtcctgccgtgaaattgaggtctttgtaaacatagagtcctgcactgacaatgtccaccacaatccatgcccaccactgttccacatatttacgtgccagcatccacatacctacgatactgagggcagtggtgaaagaatcaagccagggtacattactattggtgaaacgaatgagtatccaggcaatgccgacaaaagtaacggcgaatacaatgccgaggggcaggtaatatttcattggcatacgggtaatgggaagttcctgctgtccttctttgatatgcagatgcagttttcgtcttacaaaactgccgtatttccacatcatccaaccgtagacggctgcccccagataatagatatttattccgaagtcagcatacagtccggcatcgtaatagacgaaaatgtagatagcaggcatgatgatgcccgctatccaaagatagatactcgcccggtattctaaccagaggtagacaagcccgacgatggttccgataatttcgagagtttgttccatgctttaaaaactcaatgtgatatgtgccagcgcattgatacctgcattaggatagtaggctgcgtaattggaagtatagagcagtttactgtctttgtcctttatctgattctttccatgcccttcgtatacggcacttcccgatgcataaccattgctttcgtatgtttcgtcgaacaggttataaatcgtcacgcctacattaacagatttcaatcctttcagtttgaaagtatatccgagattcaggttgctcacacaataagcatccagtgtacagtcctcttgatgagcattgtttaaatattgcttgctgacatattgcgtttgcaaagatgcattaaaacctttataatccaaagaaatgagactatttgccataaagtctggtgaaaaggagatgggagtagtgccaatatatcgagttgtctgagagataccccagttttcactatacatatctttccagtcttcattcacatcacttagatattctgtataattcttgatgcggttacggctccatgttgcgtttatatcccaacgcagccagtttgtgatgcgtgcacctgccataagctcaatacccatacgataactgtccttcacgttctctgctacggcttcgccaatttcattcaattgcccgttcagtaccaattgattcttgtaatccatgtagtacaggttgacgcctgcattgaaccaacctttacggaacgtatatcccacttcgtaatcgaacatccgctctgatttgggctgtgcggcaaataagttatcagtatagttattgcgtgtcggttccttatttgccacactgaaagaggcataaagattattattgttgtttatcttccagaatatgccggctttagggttgaagaagctgaaatcttcgtcaatattcagcggttgcagatgtgccggatcagcagtccagtcccatttgtcattattgccgtttatcttatagcgcagataacgatattgcatatcagcatagaagttaactccatccagtatttcataatttatcttagcgtagatgttgccatccgttttccgtccgatattacgataatattcatggtcaggattcagttcacccagataattctttacccataccaccttaccgttatgggtgtttttgtaataattcaggccaccgccgatggatgcatccaatttgtcccctttataatcgaaagagaatactccaccaccgaaacggctgtctaccagtttacggcgtacaaggtctgatttctctatggtagtaccatttgtttcaaagggtaccaagccatattctaccagcgtacgcttattcttatattcctcataataaccgtagccgtctgtatagtgtagcgctatgttcaatttccacgaaggagacaatatctgatttaataataattgataatgcgtctggcgataataatctatctggttatcataaaatccgattacatttccattatcatcttctatggcgccattgggattatatttgcggtcgttttccagtgtttccttatccaggccatcccaagcatgataggtctcttcttttcctccgaaggtgatgaatttaatagtggtcttgtctccataatatccgccttgtacaaagtaagacttcaagtcagcactggcgcggtcacggtagccgtcactgtggatattagataaacgtgcatcgaatccccagcgtccattaatgagccccgtacctacttttacggtttctttatgtgtattgaatgagccgtaagagccggaaaactccgcatacggtgtgggcgaaattccttgtgttttcatattgatactggcaccgaacgctccagcaccattagtggaagttcctgcgccccgttgaatctgcaagtcctgaagcgaagaggcaagatcgggagtattaacccaaaagatagaatgactttccgcatcgttcatgggtataccattagtggttacgttgatgcgtgtagcatctgttccgcgtacccggatactcgtgtaaccgatacctgcacctgcatcgctcgttgtcagtactgacggagtaaatgacaacagatagggaatatcttgcccgaaattctgcttcttaagttgttctttactgacattggtaaacgccacaggtgtggttcccgtggcacgggtagagataatttctacttcctgcaggcttatcacccgcaagctgtctttctcatgcgtctgcgcacagacacccagcgttgccattaacaggcaggccgccattgcatgttttctcattacaattttaactattaaagatgaatacagaaaaagggagcttttcttcttttccctccgccggcactacccggatcaggtcaatgggtatgatctcagcccgtcatattagggcaccccttagttgaaatcgggggcaaaattaagtgttttcgctgaaacacgcaaatcgagtgaacgataaccggaaatatttgttaattttgtaggccggtgggtattttttaatcctgttggtaaagtgtaattattaacttcaaacgagcaaatattatgttattattattgcaagcggcagctcctgctgccgaaactgttgtagaagatggttttagtaaattgcaggtctttctccaacaactgatagactggggagtaaatgcaggtggtcatatcatcagcgctgtgctgattttcatagtaggacgtttcctgatatctttccttaataaaatggtggcccggttgttggctaagcggcatgtggatgccagtatccagagttttgtaaagagtttggtgaacatcttgctgactatcttattgattattgccgttatcggtaaattaggagtagaaacaacttcatttgctgccttgctggcatccgctggtgtggctatcggtatggcattgtccggtaacttgcagaactttgcaggtggtctgattgtattgctgctccgtccttataaagtaggtgacttgattgaaagccaaggcatcacgggcacggttcgtgagatccagattttccatacgattctgactaccggtgataataaaattatttatatcccgaatggtgcgttgagcagtggtactgtgactaattacagtcgtgaagctacccgtcgtgtagaatggataatcggtgtggagtatggcgaaaattttgataaggtggaagaaactacccgtcgtatcattgccgaagacaagcggattcttagtgatccgactccttttgtagcccttcatgcactggatgccagtagcgtgaatgtgattatccgtgcctgggtgaagagtgaggactattggggagtttatttcgatatgaacaagaccatctactctgtattcaataaggagggtatcggtttccctttcccacaactgacggtacatcaggcaaaggattgatagtggtctggaattgataaccataaatgaataaagggcataacaacaatttgttatgccctttattcattatagttaatactcgtgatagtttttattgtaaatcacatttcatatactccgagttcttcctctatggcctcacattcatctttctctatatgcagtaagcgattgatttcccttcgcttttcgaggtcagtgaaataactttctactacggtatacaggtcgaatcctttggtggaacctgctgccatgtctaatgactctaccattttctctacttccctgtgaatgcgttccttgttgatgaaatgcaactcattactatgaatcagatacttttccatgatcgttggtatttaaagttctattaatataacgtctgttatgaacggttagttcatacaaaaaataataattcctctctaagttaatagagaattaatagctttattaatactcctcgtgtattattgccgaataatagcgtaaaagtaaatttaaaaagtaataataccatgaaaaaagtaattagtatgaatctgataaatgtaattcaaatgaaaacacaaagcttttggttgacggcactattggtgctgttaggtgttttttctacagtgaataccaacgctgcagaaaagttaatggctggtaccggcaaagtgaatataaccccgcctaatccccgctatccggttcacgattcactctatgcacgaactcttattcttgaagcgggagcttcgcgtattgcttttgtctctctggatttggttatgtacagtaatgttccgttagccgagaaactaaaaaagcaatttggtttgcaggaagtctatttctgtccccagcatacacattccggtgaggcagggcccaaggaatggctcgatgctcagataaccaaagctttgaaacaggcttcttcttctatgttcgaggctcgtatttcagccggttatcgtagttttcctcaattaagtttcaaccggttgcttcttcgtgaagacggccgcgcccgcgaatcatgggtaggagatgaccactacagggcggtgaatccggagcgtattcctcatgggcctgttgataattctgtaggtgtcattaaactggaggacacgaaaggcaatccgaaagtaattctaatgaattatgcctgccatccggatgtggcctggaataactttgaaatctctgccgactatgtgggctatgccactaaatatacggaagaagcttttaacaatcaggtatattgcctctttgtacaaggcggtgcaggaaaccaggcacctttatttaaggatggcggacgtaccgggccggatgaccctcgcccgtccaattatgatttgatagaccgtatgggtaaattgctttctattgaagccgttaaactggccaaagaaatatatccgaacccgtatgatgtacccaatattaaggtgaagactgactctctgcattttatcggcagacatgacaagaacctgaagtataatgtgcatttctccgtaatatccattaataaccgtattgccattgccactgttcccggtgaacctttcatcaagttccagattgattggaaacgggaaatgcaacccaatcatgttattcctttcttcttcggatatacctggaacaacggaagatggccgatgtatctgcctgatattcgatcggcagcttatggtggcttcggagcagatgaaggatcgtggcttattgaagtcggagcaggtgaaaagattttcaacaagctgatagagaattattatcggatgatgggagtattccgttgaggatgctctgagtaaatagaaagaagaagatgtatcgggaaatttccaaatacatcttctttgcttttattgggataacagtgcaaacaatgattgttctcttttatgtactaaaagtaaattttataactgatattcggtatcaatcccgatccgtcttttttctctatcttatgagttttttcgttgtactggtaaaagtgcattcctgtgcgcatacctacatttagcattttaatagaaaactcatgagatattttctttttattaattctataactgaaagagatgtcaccgttgatggagggatcaaacttcttgctgtaagctctggtttcatcaaatttgatatcatgttctatcatacttttaccttcatctacaggggtatatcggtcaccaccttggaaaaagatacgcccgttgagacttagtacattttgtttattacgtcctaccatccattcttttccggcaagtatgttcaggagatagtttttgtccaaccgtgtattacgccagatgttatctccggctttgtattttgatttaaaaagagaagccgttatcatatagtagaaaccatttttcatgtattgttctaatgtgatgtctataccgtaattcactccggagcctctattctttaatgtcctgtccagatagaaactctgatggttgatgatggaaaaggaagaattctcttcaacaggtattcggaatagatattgataatagggttccacttttaagtgcatgtacgagttgatgttccagtcgtatgtaagcccgaagtgatgagcctttgaaaaatccaggtatctgttggatttggtttttccgttggcttcctgttccacaaagtagtagtcaagcttttccctgcgactgtgcagaccgtatgccagtgccaaggcgtgtttcggattaaagctccatttaagggctgctctgggttctacggtccagttcttattcagggtgaagtactgtgcggtgatgcccagactggtagtaagatggttacttaggttgatgacagaactgctgtatgccgagagcacacaacttcccccattcccttttgaaatctgttccataggtacatctaaaccgaaattaggactgattttgtaatccaagtcatattggagccctgtaactgtgatacctgtccggttgatatggttggaattgaatttcttgttcagataggaattaaagactatatcccatttggaattccggatatctcctacatggaccagtttgtcatcttctgtcatctgatcagctctcgtgcgatctttcgagtaagtggcggctaatgaagaacggatatacgtatctgcattgataagatacttgtgtgtaagtcctcctgccgctttgtcaaaagctgtatttccggactgccggtcaccttgtgtctcccattcatcacggtcgatggcttccggtttataacggtcaatcagcccgattccccagatagagaaagttccggccttccgggtaggaaaatttaatttgaatgataagtcctgatatttcagattcatatcatttcttgtagccaaggaagtggtggagaagcggtaattgaagatataggaacttccatgcttcctgcttatcgggccttccgatgccaggtcaatacccagaatacctaactgaaatgtatgttcatacttctgattgttgccatttcgtatttgcatgtcgaagatacctgatagcgcattgctgtattcggaagggaacgcaccgttgtagaaatcggagttaccgatcacctgtgtactcagggccgaaagaaagcccccacccagtccggtaaggtcggcgaagtgagtcggattgggaatttctaccccttccaacctccattgggtaaactggggtgaatttcctctgatagctacagcgttggttcctacatctcctgccacacctgcaaatgcggaactcagacgtgccggatcatcaaaaccattggcaaacctgcctgcttcttccatgctgatcatgcgtccgccggtaatggccattgcattcagaggtttatctttctttatctccggttgtatgacgacttccgccaacgagtgaatgttttcatccagagtgatttccatatatacttccttggaagaggttacaggtatctcattgaaaatattggtattatatcctacataggaggtttgtatattgcatcgtcccacaggaacattgtctatccgaaatctccccagactgtctgttgtgctgcccaaagaaccgacattcataattcttacagtagcaaactctatgggtgcattggttttggaatccagtacaattcctctgactgtttgggtaggtttctctgttttttccttggtggatttctgtagttcgttgccggatggagtgataatgatatggtagcctgttattttgtacgaataccgggtttctttcaggatttgtgataatgcctcgtcaatactctggttttctaatgacagtgatattttcttctttacatctacggtcgacaactcataggctatgctgtatccggtttgtagttctatctcggcaaaagcttctttcagtgatatgtttttattttgtatggtgatttgctttttgtcattctgcgctgtggcattaaatgatagaaaggcaaaaaataaaaaaaggagtatcttatttatttgtttattaatggttattcggttcattattgtatatttttataagataagctgcatttcggcagaactttttcatgcaagcatgaaagttctgcactcaaattgcattatctttgtatggttgatactttattttagttcactttcaaatagagcattagcatttcagaaccgggttgagggtctcaagctgcaatccggttctttttcttcataggcagtttctttttattgttttttgattagttccactttgtttccttgcttttgataactgaagccaatcatctcacttaatacagacagtatttcttccaaattttcatttctaaggaatcggacggtatattgtttggaggcaggaatgttcattgtatgattgatagtcacattataacgtctttcaagtgtttgcaggatctcggtgaaaggtgcatcggtaaatatcagtttacctgtgatccagccatctgtatcggttggggagacttcagtaatgttgacggcggatgtttttttatcgtatgtcaactgttcattaggctttagtatccgtgggtcttgggtgggagggataacttcaactttaccacttgtcagggtagtggtcaccagttcatcatcagcgtaagcctttacgttgaatttagttcctaatactttaactgagagttgggaggtttctacaataaacggtttacttgtgttcttccgaatagaaaaataagcttcgccatcaaggtgtacaaggcgttgcactttcgagaactctttcggatatttgactacagttcccgcattcagccatatttcagaactgtccggtaataagaagtgtttcttgtcaccgtatgcaactgatatttcaatccatttattttgtgtggaggtataatatagatagcctcctgtcatcataaatagtggaatcagaacggctgcaatacgtgccaatttctgataggaaggtcgatgaacgatttctttatagtcaattctttggtttactctgtccagtataagttcagtgtccggatcggcttttgcttccagttcattccaatattccagtgaggctttttctttttcctcaatatctttatctttaataatccatttctgaaccctttcttctgtatcggaagagaagcgtccggataagtatttcctaagaattctagcgataatattctttttcatctggctgcattttataatatatacagctaacagatgaaaagctcagtaagaaaaccgagtttttttaattttttattttaaggaagtaggctttctctaataaccgagaaaaggaacaaaataatctgcaccttactaactccatatctcctccataccaactccactgttttgttccccgtataggagtggagcaagtgcgggcttgatatggatatggagagcttttgaccaaaatgagttatcggattaattcgtttcctaactctattgtgcaggatgcttataccaatctttattagtttttccctcagactttacccaatcgttgaattggggataagctaagtcgattcttacactttcatcgggtgtagggaaatccttaatacttgccaaattcagggcaaagggaaatttaagcctgttcattacgtagtagaggccttcatcagggcgtgaagcatcgcttcctgtaccgaatagaccgaaatcagccttgtctgtcggaggatatttcactaaatgtacttctcttcctctgtctttgtccgattctacaaagatgaatggattatatggaggtacgacatttgcttccacaagatcgttcaattcaaagcttattgtgattgttttttcaagtacacctttgatgttatcaaataataagaaagtaggatgactttgtccaggctcctgattagctccctgcatatattgggattgttcggctccgtctattgttatattacttacatcgccggatgagacactactcaattggaagccaaatcctgattggagtgtgccaccattatgacgtggaatgaattgattttctatcttatatactctattgttactcgtgtttttatacactttgcatgaatagtctatcatcacatcattcatatcatagtcacccattgatggccacaagtcttcaaaggtcagtgtaccatagtatgtggtgaagttctccgcgttgctcggtggatttcctatatccggtattgtaggtgtattactttcgtctattgctcccttctcttctatttgcagataaaaagtggcgtcattgtaacgaaggtcggtattatcttcgaatccgatagctacaagttggtcggagttgggatcccttaatgaaacgctccgttgttttccatctgagtttagatgcgaaagggagaatctgttatatttttcatcgactttgggtttgacatttcctgcctcgaatcccattccctgcaaccaccatccgatagttactcctgccggaaattcatcatggaatttttctccgtcccaatacttcaatagtactctgtcgccactaactaatgctcctgtttcacccttgtgagcaatagaggtggcactggggaatgcgatgattctctgcagttccgatacgctttggggttcctgtccggtagggtaactaaagtagccgacactattgtaccaaccagcggaactattgatgaaacataaataaacttttgtagctttcctcaaatccgcaactaagcccttcaacgtccttcttgcgtgtacaagtcctctcattactgaattggcagataaattgaggcagaaacacccaaatcagcctacaatatccccttaccccacaatgcgacttgaggcaatacgcagtatcatacccataagttgtaggcgttatccaaaatctgtctgaaatacatccgcgtaagcattgttacaggtatagatattcagcacataccgccttgatgtcctggtccactttgctggtacagagacatacctgaagacaaacgcttttatgcggcttgttgcattgagtccgaacctctttacgtcaagtctgtggataatggccttgtagaagttacgaacaagtgctgtaagaagaaggaacacggtgttctctgccatgaaggatttgggcaatctgtcccacccaaaaccattgttcatatcatcgaagattcgttcctttcctccacgaaggttatagaactcgacaatctctcttacggaagattcatagtcgttagtcaggatacaacggtatgtgtattctccttcccaaagatcctgcacaccatccatccgtttctgtctttgaatcacgagtcggtatgctttacccttccacttatcaacaaggattgagttcaattcgaactcaatgccattgatttcctcagttttccaacctctgagagcaaagatgtcattatagagcgaactgcagcggttagcacggatatagaaggatttgcagtgttcctctacttcttctacgatttcctcggaacacgatccacaatcagctctgaaacgattgatagtaaggccgttctgttcaaatctctcaaagaatctcttcagcgtgtccttctgatgaaaacggacatttgtgttgccatcgctattctctatgccgacaatcaagtcgccaataatcgccacgccagggcgatagccaaggaacttcttgtatgtaggcttggcatcatacttctctgtctctatgaactgatggtcgaaatcaacatcatacatctcaccctccttcagttggtcagatgcaaacatacaattgagcagtaaagtattgagagtgtcagccgtgttgaaatcgtagttctttcccatatctgatgtgtatgagatgttttcttgcgtcagctcctttatcgctctgaggatagtgtcagaactacaagtacgaagtgtcggatgaagtgagagatggttcatcaaatgagtagtgacatcctcaatacatgagccaccacagaagtagatactcatgagagaacggatgatttcgctgtactgataaccgaacgatctacaccttagaccgagggtcgagtcgattacagatgacaatgtggagtcaaattgctccatgattgaaaatattcctccaaaaggagtgagtttctcagatttaatttgtatttttgccatgcctgatgaggttttgtttgattattatagcaacactaaattaagtgaatcctctgacatggcaaaatcctgggcaactttttgttgctcaggtacttaaaaagtttaagttataatagtgttgcggaattaagggcttttatgattttgatctcagaactaacgccaggagcgaagaatgcttttccataatccctttgctccatagcagttccattgtatttgacgaatatctcatttatattatacaatgtttttgcatcaggtagtactctgccgggtgttagataagtaggagttccgagggtactccagtcacccaaggttagccagccgtcaggatattgatgattgttaggtgttaaggctcgggtagttgcttttgcaatatacttctcctgattgtacatgatagagttatcagtaacttctaactgaataggagagagtgttccggcatactctgagtataaccagacctctgacaaagcagattgaatttgtatctctccggaaaatttaccatccttatctgtggcggcacgataaatgggagagatgtcttttttgacaagttccccgttttcattttctattatcggattttcgtcgtagaggtcgaataagacaacatagtcttttcctttgaatccatagtccacagacaggtttatcttctggtttaagtcaaaatcgaagaactggtctgccggaattttaacatacacctcatttttttctaaacaacttgtcgctagtaatagtgtcgaagttatgcaagtagcaataaataaaaatcttttccccataagattatgaatataataatctgcaattatacgaagaaaaatgattctttgttattttaagtgaatatattttttctattactccttttttagggggttggagcgaaaaaagagtgtattataacagtgataagaagaagcatgaaattgttttccgtatttctttcaaggcgagacttagctggctttctacatttctcttggtagtattcagttgtgctgctatctcttcattgcttaaaccttcgttacggctcaggatgtatatcttcttcctctgttccggcattttttctactgtgtcgtctatcaataggccgagttctttggctatcaggtcttcttccgaagtggaactgcattcttgctctggaatattatttagataggcatcttctacatatttatgtttcaggaagttgatagcagagtttcttgctactgtatgcaagaaagcgtcaaatgattttgaaatatcaatagaatgacggtttatccaaagattcacaaataaatcttctgtaagctcctcagcatccggattcgacttaatgtagccatatataaaggctttcgtcttaccgtaataagtgataaaaacttcttcgaaagccttgtggctaccttgctgcaaagctttcagagttttgatatcaatcttattgctcatttatagtccagttttgttttttgacgggagcaaaagaagtgattatttgttttatgcagttattcttttggattaattaaccatgtctattttattttctattttcattcttggggctgatcattcctgcaatgttttcatataattcctattttaaaaacttcttcagtggacaatctgtcgtttttaatccttctgcaatacttcgggcattcatttgtgctcctttcaaagaagtgtgtgtatgatccgtattgtagaaagctgcggctttctcaagtcctactttttggagtttatcagcagatagtttattcaggtctataaagtaagcaccggttgcttctgccgcttcacgtgtccacttgccataactctcggtattacgctctatttgtccgtctttccatttattgcggggggtatggctcagaacaatgggaatcgcccccttttcttgggcatccataataaatttacggagataccagccaaaggtatagactacttggtattttccagtcttctccattaagaagactttactttcgtttcctgagccatgtaactcaccgcgggcttttccagtgttgatatctcctccgtcattgtgtccgaactggattaatacgaaatctcccggtttgagtgcattataaaccttgtcccaacgtccttcgtccaagaaagtacgggcactacgtcctgccatagcacaattctctaccgatatttttttcggattaaagatctcggctattacgcttccccagccccacatgccatttttatcatcgtctttgtttttgactgtactgtcgccgatggtgaatactaccggacatccttcttttcggctggaaccagtgatcgtatcttgttcaattggtttcagatagttagccagttccagacctgcatattcccgaataccttcggcggcagattctgcatttacttttgctccgaaagcactggtgtgaatgcggtctaaatagaacatatacttgactttttccttgccgaatttctcgaatttacgggcagtgatatcattcagatcaatgaatggaatcttttgttcttcggctatttgcttggcccatagaccaaaagtgtgattgacgcgtgtgataatcgtgctatccttgtcttcccaagcattgcggggagtcagggagaataggataggatgggcaccttttgcttttacatcctgtacgaaacggcgcatatattctccgtaagagtatacagtttcctgtactccggtttcctgaatagtgacattcaggttgtctttaccgatacctggtatggaggcacgtgcacgaccgctatcataagggccgttgtcgttatgtcccagttcaataataacccaatctcctgcccggacacctttaataacttccggccagagacggttataaaaggtacgactgcttgttccccccagtgcatgattctctacagtgattttatttgaatcgaaatgatcgccggcataatatccccatccccattgtccattattaccattccctaaggttccggtacgcatagtagagttacccactaaaaataaaacgggattatttccttttctacttgaccctgctacaggtcttgctgtgtgggctttatttaaactatccagtgtgttgtcaataacttgattgacgtctttcatgggtgcagtaaccttgttctgagcttgtgcagacaatccaaaggcaaatacgatacctactattaaataactgtaaaatgtgtgtttatccatttttctataaccttaaattctttgtttgtgcaaaagtaggcgaaatataggtttctgtaaatggaatattattcataattactgtctttttgtacactcaagtgggattcttttaaaatagaatccccagtttaattgaaattgagttgtgatggagcttttcttggaattcggttgcgtactcattgctttcgtgttttttcagtcgttccagattctgtatttcatatccgatacccaatagcaactttgttttatcatgtatcgcatactgtatgccgattgtcgagttgaagaaatatccaccatttacatctttttcaggagcaaatgaatatcccatactacattgcaggtaaggtacccatcgttgcgctgccgccagctggtacctgatatctgcaaagaccggtatcaatgctttttcataaaaagataatcctgttccaattccggcagagaagcgttcggtcagtttgtaatgaccagatacctgccatgtgaatggcgtagaagagggttcattcataggaatgcctgttccgatagttgtgatataggtgaaacggtttgatatttgccctttcatagctgatgcgatcagaacggatagaagtataaggattatctttttcattgtatatttactgttattcgttttacaatatggagtgctgtcgttaaggtagacaggtcggcatctatcttaccggaacttccgtcgggagtgctatgtcctatcaggacagcttcgaatgacttttgcccggatgtaaggtttatatctgtggaatagataattgcgggttggccgctaccttctttacctccagaataatttgcagcaccttctttggctgattttgggtagtaatcattgaaatctgttgaatgattgatctctatttttatcttgaattgtttcagcttgtccgttaagcgtagtttcacatcaaagctgccgcgcggggtagctcctgaaatgccatctgttagtggctctttctgtgtgggcagataaagcccgtcttcatacttcactccacgtgagtgacaccaatgtggcagagcttcttttctccggttaccccctgcgctttgccaagactgggtggcaattttatggctcgcataaatagtagatatgtaattaccattcatatcctctatccagattgcaatctgaggtgggttcttctttttgattcccaagaacaatggaaaatcatgtaaccattcatcaccttcttctatacatacttttacgtctcctgcttcatactcaatcagatctttctggcaggagcagaagctgaatagtgataaacacagccatgtcataatcattttcttcattctttaattcatttaattagtattatatttatattgttaccaagtgggaacatataggtcataagataaccggatatgatatctcatgttatatatcacatctggagaagtttatctataagagtgtctattccctgaatgatctgtctccaacccgtatcgttgttcaaaggtattccattgtaaaccggacaaaattcttccagcatcacaagataagtgatggatgctgtcagaagggttgccagtggtgcgagttcttcttgcggataacctgttagttcgcttatttttgctaaacgctgcatgcctgctttctcgcgttgttcccttaatttcactatcatttcattgtcggaagatagttcccaccgatagagtcttttcagagttggattgctgcgtagttgttcaatctgctccttaaacatatttttgagaaaagcctgtaactggttacggtcaggaagttcctggggaaagtttatccagaagtcgtgttgtcggatataagcagccataagtccttctaccgaaccgaaatagcggtatattaatattttggatacgccggattgattggccaccgcattgattcctatcttttcgaaaccgctttcgtttatcatttgcccaatggtatccagcaagcgtctttctgtggtttctctgtctctttcggtagtggtactttttgctttcatattatagcatgttactaatcgggaacaaatatatgttaccgattggaaacatgcaagaaaaaaggagataattttgtggataagtgcattttgctttaaaaatcaaacattaaagcattttgcaatgttatactaataaacttcaatcggcatgcttactactttcttaaacacattagctacaataatcagtgtgacaagtcttctaattgtcacctatggagcattaatcggaataatatcttttctgatcaatgagttcaaaaggttcacgggtaagtattcgactactaacatccgaaaactacgggcaactttcggaacttatttgttgctcggacttgaattcttaatcgcatcagatattttaaaaacagtattggagccaactttgaatgaactggctattttaggtggtatagttgttctgagaactatcttatccgtcttcctgaacagagaaatcaaggatctggaggctgaaagcgaaaaagatcaatgatgctgtagaaagtgaaattctttatgttaattgttaacataaagaatttaaatagttaacaacttcctttattctattaaaccatgttataaatgtccccgtttcgtcttggaaatttggagatatcctgaaagtccgtatctttgcaatgtgtttttcatagtattagatttaaggttaacaaaagattggctgtctgggatagatagcctttttttatgttggtatgtttactttatactatctctgtatagtctcccatcataacttttatatttagtgtcactgtacatgcaaactaacatatcgctataatcccaaattgctttattggcttcctgagataagttggtagctaaaatgccgctccccaatatacccgggttacaaggaatcgtatcttttctgattgaattcatgattaactcaatacaggtatattctttgatgttttcttcctccagtctattcactatatattggttaatgtgtattttgtcatttttagtcataaaaccgtaccacaataggcatttcatatctgcttgggttgcttgtattaatacatccagataggttgttcccgatattccctttttatcaatttcataaggatcgatatggaggaaggaagattgggaaagtgagagtagtagttttataaccccttcgagcgaatccgtatgacaggtctggatatgtgattctaatttcacttgtttggcataggattctatattttctaaagcatctttttctatatcaaagaatagatattgggatgttcgttctgccaatgtattcatagctaaagcgggagagcctaaatagtttccttttgccatttctgtgctttccagcttgtaataaggagattccctcaaaggtttttcttcacgggctttctttaggaaatgataaatgccgtattgctgttccggggtatgcgccatttgataaatggcggatgctgaattcgtttctatgtatatctgcggtttttcgatttgaagaacctcacaaagcaccagatgtttgaatacatcagcttgtttcccataatgagtgtaagttgccatacttttatgatttatgtttatggcggcaatattaagctatataaagtgaaaaagccttgaccagagtcaagacctttcgttatacagttgcttttttcgtattctgctgagggtttcgggagttatgccaagaaactgggctatttctttgaatgaaagcttttcttgtaaaccggggcatcgtttcattaatgcatgataacgttgttccggagtatcgcaataaaatcccaatagtcgttggtatatttctgcaaacatggtttcggctatttgccttcctaatcgttgggtgtccatgtctgtttcccagaattgattaagtttgctcaaagggaggagataaacctcacattcggtagaagcttgtatcgtgactgtggaaactgtctgttttatgaaagaaggataatcacaaacaaaatcatttgcaaagctataacctactatccatgtattaccatttgcatctgtatgagacaaacggaatataccggatacgacaaagcctatctgattgtttttctcgttttgctgtaccagatattcgttctttttaatttttatcaggagcccttcttccaagaataatttttcgagtcttgaggtatccggaggactatcttttacattaaatttgtccatgattatcatattagtacatacgacaaaggtacgaagattacagaataaatgatatagttctaaactaaaataagtactgaataatattatatattatttataaataacgtatacttaagaaagagtagtatgctgaacctaattcagtcgtatagtgaatgccattcagtcgtatactgaatagggttctgtcgtatactgaatacagttcggtatatcatgtccataatcatcagaaagacgttaattcaactactgatttgcattattaatagaaaagttctggattccggaggattaatgtgtttttaatccaatattaattctgtttcggcttactttttaatgtcaccctgtttactttgcagacaggaaaaacaaatatgtctaatacctaattaatagtattcttaaatgaaacgaaatgcaattttattaagcttgttgacgactttgttcttgctgccgggaaaggcagtggggcaaaccacatcgagcgatggtaaattggtgtataatttcccgtttgcaccaagtgagggtcttgtgaatagaacagaaaaggagtataggaaagaaatctgtctgaatggctattgggatttccaacctgtggctttgccgggtagttacgtgcaaggtaaaggagtggcaccggaattatcactgcccaaagaaggtgcatggagcaaaacccgtataaagattccttctccatggaatataaattcttttgctaacagaaatgtagagggacctgatcatcgcaactacccgtcttatccgaaagaatgggaacaagtgaaaatggcgtggatgaagaaaacagtaactattcctaatgactggaatggtcagcagataaaattatattttgaagctgtagccggctatactgaggtctatatcaataaggaaaaagttggagagaattttgatctttttcttccattcagcatagatattacgaataaggtagctgcaggtgaaaccgctgaagtatgggtgggagttcgtagtcaatctttgtttgaaaacaactctacaattggtcgtcgcattgttcctgccggttctatgtggggatatcacattgccggtatctggcaggatgtatacttgttggcattgcctaaagtacatgtggaagatgtatatgtgaaaccgttggtttcaaagaatatgcttgaactggaagtgactgtacagaataatacggaaaaaaagactgatctgcaacttcaaggtaagattaatgaatgggtaaacctggctgggacagatgttaattcagctcctgtacctgcatgggaacttggacaggaagctttgaaagtgacccctgttaaagttagtatccctgccaatgcttcaacaaaagttgtgttgcaggttccggtatccggtgagttgaattactggactcctgaacaaccgaatctttatgccgtattgctttcattgcaggctaagaaagaaacccttgatatgaaatatgaacgtttcggatggcgtgaatggacatttcaaggcaccacacagtatctgaatggtaaaccttatcagttgagaggtgattcctggcattttatgggtattccgcaaatgacacgcagatatgcgtgggcatggtttactgccattaagggtatgaatgctaatgctgttcgccctcatgcacagatttatcctcgtttctacatggatgtagctgacgaaatgggtatctgcgtattgaatgaaactgctaactgggcaagtgatggtggtccgaaactggattctgagctcttctgggaagcatcaaaagaacatttgaaacgttttgtactcagagaccgtaatcatgcctctgtctttggttggagtatcagtaatgaaaataaaccggtgattttgcatgtctacaacagaccggaattgatgcctcagcagaagaaagcttgggaagattggagagatattgttcgtgcaaacgacccgacccgcccatggatttctgccgatggagaagatgatggagatggcatcttgccggttacagtaggtcactatggtgacatgaactcaatgaaacattgggttgagataggtaagccttggggaatcggtgaacatagtatggcgtactatggtacacccgagcaagttgctaagtataatggtgaaagagcttatgaatcgcagttgggacgtatggaaggattagctaatgagtgctaccacctccttgctaaccagcgtaatatgggagcttcttacagtaccgttttcaatatggcatggtactctttgaaaccgctgccactgggaaagaaagatatgactacagaaccggatatcaataaagatggtattttcttcactgattataaagaaggtgtaccgggtgtacaaccggaacgtgtaggtccttattgtacaacattcaatccgggatatgatccgaatctacctttgtatgatccatggcctatgtatgatgctatgcgtgcagccaatgcaccgggacaccctgcttggtctgcttatgctgatattgaaaagaaacaatatgaagcaccgacagctactccgtcagagaaatataaagaagtgattttcataggcggagatgacagtaaattgaaaggtattctggatgcgcaaggcgtgaaatttgctgcaaagattactgcacctgcacgtatgatctatattgtagatggtacttacactttgtctgctgctgaaaagaagagcatgttagctaatattgctaagggtgctgatgtatggatttggggattaacacctcagacattgaatgtatacaatgagatattgcctcttccggtagcgctggacaaccttaaacgttcttctttcctgccggttcagaagtcatggatacgcggcttgaataactctgatttctatttctgcgaactccagagagctgatgcttcagaatattcattaacaggtgcgctggtagaagaaggagatgtcttgctgaatgcttgtaaaacagattggagagcttggaataaacgtccggaggaaatcaaaactgccagcacggtgcggagtgagtacgaatgtacagctgctactcctgtgtttgtgaagtatcggaaagatgcctcttgtttctatatcagtaccctgaaagaattcactaactctgaaaagggatacaatacactgggagtgattttaaagaatgctggtattgattgtaatgagattgaagtaaaatcaaatgaagtcttcttcttgcgtgataatcaattggtatttccggttgcagcgaaggagaagttagtgaaaaaagcggatggatgggccttggatatctatgtatttagtccgcgtcctttggatgacttgctgattgaaccgaatatgccgaagctgactttggttgtgaaagcaaaagaatgccagcttgctattaatgataaagcatatgcagccgcttcgcaaaataggcatgaggctacttataaagaactgcccttgctgcaaggttggaataaggtaagcataaaaataggagaaagagataaaaatgaattcagtggtaattttagatgtgataacagaaatgaattcctttcttcgttgaagattatgtatattaatcctgaagctaaatgattatagataatgattagaaagatgtagtttttaataggttcgaggctgtaatttaaactgtgtcagcaaagcaaacaaaaaaagtattaactttgctaacacagtttttttatgagtgaagaatttgattttgaaaggatcaagaacaaggcaatcgagcagctcaaggctggcaagcccttgttgggtaaggacggagcttttgccccgttattggagagcattttaaatgcagccttagaaggtgagatggatgcccatctttccgaggatgaacgcatgagtggcaaccgtcgtaatggcaagatgcagaagcaggtgcaaacttctatgggtgaggtgaccgtttctacaccccgtgatcgtaattccagcttcgatcctcagtttataaagaagcgggagaccattcttgcggaaggtgttgctgaccgcataatcggcctttatgcccttggtaatagtacacgtgaaataagcgactggatggaagagaatcttggtaaccgtgtgtctgccgaaacaatcagttccatcactgaccgggtacttccggaaataaaagcgtggcgttcgcgtagcctggactatatttatccgatagtttggatggatgccattcattataaagtcatggatgagagaggctgtgccattacccgtgcaatctacaacgtattggctatagataaggacggtcgtaaggatttgcttgggatgtacatctctaagaatgagggggcaaacttctggttgaatgtgctgaccgatttacagaaccgtggtgtacacgacattctcatagcttgtgtcgatggtctgaagggcttcccggatgccatccaaagcgtattccctgataccatagtgcaactttgtatcgtccatcagatacgtaactccatcaaatatgtcggcagtaaacaccagaaggagtttcttaaagatctgaaacgggtttacggtgcagtcagcaaggatgccgctgaaacggagcttcttgatttagatcagaaatggggagagaaatatcctatcgtcatcaagtcgtggcaggacaactgggaaaagctcactgaatacttccagttcacatccgatatacgtcgtatgatttatacgacgaataccgttgaaggctaccaccggcaaatacggaaagttacaaaaaacaagggcgtgttccctaatgacaccgcccttgagaagcttgtctacctcgcttatcgcaacatacgcaagaaatggactatgccactggctaattggggcacaattgcccaacaactggcgataaagtttggagatagatttaagttgttgtaattttacgctcgtcgggagtgctggtgcacccccttggcgctggccgatccccgaccgatgagcttgaaagaaaaacagcgcatgacacagtttactttacgcccccataggttcttttttgataagttcagtgttgcaatccagtgtagtgcgagataattcgcatagcactggattgcttatttattttttattctttatagttatggcggcttatgttatctttaatacttggttggatggccgttcttgcatcaatgccataacatctgttgttttgtacagtgttatgatggattgttatatctttgcaattattcatttgcttttcgataaatatcccatcttcttcatttccttcagcgaggctgttgattatggctatttggctactttctgcacatcgtatacctgagagcccattacgagccatctccgaatgagttgcttttacattcatacagaaggtaacgtttatgccatttccatagggagaggtatcaaaacgactacttgttatttcacaattggtaatgtatgataaatgaagattgtggtgaaatccggcacccggcactacactggctccattatcactgaaatcacattggtgaatgcgaatgttttttccactgactattgctacaccattttttgtgaaattctgtactgtaatattttccaaaacgacattctgtataccatctttctctttggatttgagaatgataccttcccggctgggagcattcatatatgaacggcttcgacggtcatgattaggatcggcattttcgataactttagtggctccttctactaaaagatcgcgaatggtgacatcagaaaggatatcttctccattaatgattgcagtttcagtacgtggagagagaaagattattgtttcacgtcccttgccggcaaggagagttccactgtatattttaagaggagcatccaaagtatgtactcctgcttccagaataatccatttaccagtatttctgttggagtttatagcctcttgtatagattctcccggttttagatggatactattggcagggagctgtttcgatttaccttttaaagccccgattatagttggtttcagaaagttatcggatcctgtaaagatagaaggttgtgtagagacattggaaattggagcttttacagctgtcagaaagcctactgacgatttggaacgagtgtgttcttttatcgctttctcagtatatggcaatattacacctcttacatttttataatgatgatatatggattcataaatatccctgaatttatcgttatctctatctgtaaaaactccaaataaatcgatatgctctcctaacatgaaacgtgcggtatattcgaatccttgtgctaatctatcatcggctacactgtaaaagtctaacccctgcgtgttggctgtttgtgcagctttggcaaattcacctatgcccaattgtacatgcccccagtctcgtgtagtttcctgacattgccctccagggtagagataccgggtgataccagaatttccttctccccagtaaaatcgttctattgcacggttgaatatatcatggttgtcggtaaaaatgccaatacacatgatggtactgatcatagatgcatcccagttaccattggcttcagtgaaaaagtctttaatggtggggtaaaagactgtaagaaccatttgtgtaaattgttgtaagtctttggaagtccaaccggaatcggtatatttcaatatttcggctgcgttaaggtagtaatatccgaaaagcccaacattcaatttggcattgtttgcatcgaatccgcggagcaagtagctccatgcattcaaaatatcgatagctttttgtgcgtaagccctgtccttagtaatataccacatcaatgcatgattatatgccatctcggcactttcggagaattcacgcccgccaatgctatttgcgccgtaagggccaacagatatttcggtacatggactggggatgaaatctaaagaggcgcttttctttaagttttcgtaggctgttttccagggctgtatgccttttagcaccatttcacgcatataatcaagatcttgtttactttgcgccattccgggatgtataaaagcttgagtcaggaattccgttttggattccttctcacctgaggctgatatgctgtatattgaactgcataacagacatactaataagaatattttctttttcatgctttttatgtgtttatgatttaccagttatcggttctgaatggagccacgggaatgccatagatattgaatacacttgcctttgtgtagtttttataggcgtatcgcactgcaactggatttggtactttatcacatgatacagcgagtcgagtcgtcttagtttctatttcagcataggcagggtagaagattttatcttcaccagcaatttcgaatccttcaagtggagtccacatcggacagagtccacgttgtgcattatctacattgatatatatcttattgccagatatttccattgatttataaatgggagtggcgtaaccaaatccttttcgtccatatgtttgggaaagggcccaaagagccaaacgatttcccacagtttctttatccattggatgaatgaataccggatgtccgatatctagggtagtgaccattccactgttgggaatatctttcatattttgctgttgaacttcacgcatacgggctgctgaggtaccatcagcgccttcgtaattgaaaggtgctatttccacgaaatagaaaggaaattctccgatattccatttactgcgcaggtctttgacaaaagctggcattaaacttttgtataagtctgcattatcgcggttactttcaccttgataccagagaaagccttttatagtgtaatttgtgaaaggtgcaatttttccattatatagtacgcaaggggtagctgtaatattttttataggttcatcattgtcgagtatagataagtcgatgcttttgaagggcgttattgcttccctgctcatccatgcttctacttttgaacctccaagtgaagatacgatgataccgaccggtacttccagtacttcttggatatatttggcaaaaaagtaagcagctgcgcttgtgtgagatacgttgcttggactattttctaaccattcacctttgcagtcttcctgtggagttttgctgaattgtcgtacccatcttccatctttagagtcggtattataaatacgaattggagtagacactttagcttttgcaataatgtcatttgtaccctgcgttggttgacgatcgaagccactcatgggcatttccatatttgactggccggagcagaaccagacttcacctattagtatatttttcagtgttaaggtttctccatcactaaatgatatctcataggggccaccggccactggtgtagaaacagctaagagccatttcccttgttggtcagtagctgttttatatgacttattattccatgatgtttttacagtaacgaaagagttttctttggcttcaccccaaagtttaacatttgattgttgttgtaataccatgttgctgctaagtacagagggcagtttgactttggcttttacagatgtagagatagaaagaaaatgtactaatagtaaaaaagtaaataacgatcttactttcatgtaattaaaaaaaagttttttcataatacagttttaatttgataaatagaacgatcttttttattctttgtagcaaaagtaaattgaagatattacttccttgattaatttgttattaatttacgcataatatcagtttaattgagctctaattccaaattctcgtatcctttatttgtaatggacgattttttgttacctttgcagtatgttctttaacgacatactatgaaaagtaaattgctaatttggatattattattcttctcatttgggtatttggaagtgttggcttctatagattatggcctacatttcaaatctcattctgtgcctggtaatgaacgtacttctttgtctcttgatgagaatgttcctttccatataaaaaatgaatttattattgattttcaaatgtgggttcgtaatgaacctgattttggtgctattcttcatttgtgtaccaatgaaaatcaatttcttcattttgtatttgcagcaggtgacaataatcgaaattttccagctcttgtattcaatgaagggatgtttgctattaataccaatatagaaaaaggtaaatggatccctgtctctttgcaccttaatatagaagcaaatcagattgatttgaagtatgatagtaaggatactacaatggtagtacctttgcgtggaactaaggatataacggtttcgtttggaaaatctccatatttttcagctgatgtagctccaatgaatattagagatgtaaagattacccgtgatggagaattgattagatattggaagttatggaaacataatggtgatgtttgtcttgacgaagaagaaggagctgtggcattggcgtcctatccttcatggttaattgataatcatattgagtggaagaaaatatatgctgaaagaagctcaggtcgtttagatattgcctttaatgctcgtgatgccttgttctatcttgtgcgacaaaataaaatagacatattaaatggtatttccggtaaccgaaacgaggtctctattgtggaggggtatccggctatggaatatacagatcacatgatttatgatacactgactaatcagttattgtcttattctttacacgaaaagttggtttcagctttgtctgtcgacgaagggaaatggagccttagtgaaagacaattggatgagcctcgttactacaaccatgcacgtacgtttaatccatctgattcttcattttatttttttggaggatatggattctatcaatataggaataacctgtatcggttgaaagtgggtatgaaacaggttgaagaagttgcatatacccctgttatttctcctcgttattcatctgcagcagctatagtaggtgatgaactgtatatttttggtggtcgtggaaataaacagggaaagcaagaatttaatgctcatttttcttatgagttgtgtgccattaatctgaaaacgggaaagtctcgtagtgtatggaagaaaaaacaatctacggatatgttgttgatggcatcttccatgtactttgaaccttcggacagttctttttatgctgttagtctgaaagacggaggcagcctttggaaggttttcatgaatgattctgtttgggtagagatatcgaaacctattcgtaatgatttggttcatcaggattgcgattttagtttttattcgtcgcctgcctatcataaactgtatctggtgatggataagattttgagtgaccgtacacatgatgtggctatttattctatcaatactcctttactgaatgataatgaaattgtgcagacggtgaataaggactctgcttcggtgtggttatggtggtcatgtggtatcctgttgttgggaggagcagtattccttttataccggataaaatgcagcagaaagaaagtcgaatttgaagataccaaagaagataatactcaggtggaggttcttcctgttaatgaaacggtagaggaggttgctgtggtagaaaagtattttgatcgcagtcgttcggcaatctctttgttgggcacatttaatgttcgtgataaagatggtaatgacataacaggagcttttacaccacgattgaaaagcttgcttatattgttggtgctttatacggaaaaaagtaagcaaggcatcttgactaaaaaagctaccgatattctgtggtcagacaaagaggaagagtctgctcgcaataaccgtaatgtgactttgcgtaagttgcgtatattgttagaaaaagtaggtgatgtagaagttgtcagtgatgcgggatttctgtgtatcagatggcatgagggagtattttgtgattatcggatggcgttggattgtattcgtcaatttaaggaaaatggtgatcatggagatgacaagctcctgaatcagatattggaaatcttattgtatggtccgttgctgtcaaataccattgttgattggttggatgaatttaaagattcttattccagtctttctattgatttgctgaggaatttgttggatgtacagcgcaataattatgatacagtactgcgtattgctgatatcctgttcttgcatgatcctctgaatgaagaagccttggcggctaaatgctctattctttttatacaaggtaaaaaaggtattgcaaagagtgtatatgaccgcttctgcaaagagtataaagattcattaggagaggaatataagatccccttatgcaatttatataaatgataatttataaaaataagaaaaagcgcttaatcataacaattaagcgtttttttaatgtccaattaataaaggatggctctgttttttaagactaaggcttttattttgcattcgtggaagtattcttaaaatcttccaatgaaaagttaaactgatgtctaatttagtctttaaactatgaaaaagtacttgttgatcggattgtttttattaggtctgtttatctatcctattaaggccatttcaggtaacactcctgaagaattatatgagagtttgcaaaaacggttggcttccggttggaatacctgggatacccgtagtgtgctgactcatgtatttcttccttatggttttgctgtcgacctgaatatgatggatacagatggaagtcgtgtaaggaaattcagaatcggagatagggctaaaggagcgccattattacagccgggacctcattcttttgatggagcgtataccaaaatgaccatagattggagaggatataagttgcaggtagaaagtgctgctataggacttaaaaacgtaattctaatcagaccactggctgagacgaagcaaggaggacgattggtggttatccctgaaagtctttggaaacggggcaatacacttagcgtggatagtttaggatttacattggcatcacgtgataaagttgttgaaatcaaaacttatatagagggtgaacttctggaaaaaaaaggaagggagtttattctgtctttagatactccggttgctatctgttgcggagaaaatatggaattggatgaggcaattgctttcattaatgaccgcgcccgcgattttattaattctaatcagaaaaaatttggtgagaattatgattgctataatgctatgcagagtgttttggcttgggataatatatatgatcctggcattaggagggtgattactcctgtaagtcggatttggagttccgaatggtttgccagtgaagattttggtggttttacactgttctgttgggatacctattttgcgtcgatgatgcttgctgttggcaataaagaattggcttatgcaaatgctgtagagataactaaggcgataacagaaagtggatttgtgcctaactgcttttatagcaataattttaaatcaagagatcgttctcagccacctgttggttctttggctgtctggacattatataagcaatatcaagaaaagtggttcttggagttattatataaagaattgctagcctggaatcgctggtggagccgaaatagagaggatggaggattattatgtttaggcagtaatccttatgaaaaggttacttatttcaggtctgagtttgatacggattgtcactatggcgctgttttggaatcaggattggataattctccaatgtatgatggagtaccttttaataagcaaaaacatttgctggagcagcatgatgtaggcatgtcttctttatacatcatggattgtgattatctggctttaatagcggaagaacttggctataaaaaagatgtaatcgaacttagaaaacgcgcggaatattatcgcaataatttagcagggttgtgggatgataagactggattttactataatcgttctaccagagatctgaaatttaattaccgtacttcacccacttgcttttatccattgctggcaagagtacctacaaagaatcaggctgagaggatgataaaagagcatttgctgaacactgatgaattctggggggagtacgtaattccttctgtacctaaaaatgatcctgcatttaaagataatgaatattggcggggacgtatttgggcaccattgaattttctggtatacttaggattgaataactatgaatttccggaagtgagacatgcctttgccgaaaaatcccaaaaattattattgaaatcctggttgtcacatggatatgtctttgagaattacaatgctctcactggtgaaggcgatgatgttgtgcgaagcgataagttctatcattggggggcattgctgggatatatcgctcttatagagaatggagttgtaagtaagtgtaattaataataatcgatcatgaaaaatataattttaattatcagttttttgttttgtacagtttctattgtatatgcccagaaacagccttttttgaaggattcctggaaaggggatatgacctctgtaaaacaagagaaaggaaggttgaagatagcatctgttgctgtacccgaaatatgttggcatttagatgctttttccaaaaaggtgagtatgtatagaaatgtgcaattgaacgatgtgaatagaactgtttggtgtagttttctggcgttgaaagaaaaagggaattcgcgtttaggcctttcatttgagaaaggcaatagtgaaaaactatttgttgcagtcaaacagacgcaggagccgcagttggttgtggtgcgtattgatttttccaaaaaggctgataaggcatatgttttttatagtcctaccgcagcttctgttcctgatttggaaaatgccgagtatactttatcgggtaaatttgattttgaccgcattagaatcatagcagaaaaagggagcaaagggatttttagcgatgtctctttgggtgagaattatcaggatgtagtacatcctaatgtcttacaagttgtagccaaggaaggacaaccacaaacagttctttcctgggaaaagaaacagcaggctttatggattcagacttcgggcggaactttgtatttgcaaccctataatataggaagtgtacatgtgatgttcggctctgagaatgaaataaaagaatataagagttttgccgtaacgcaacaggcaaaagtggcagagtttaaagtggaggatactcaggaagatattgtattacgttcttcccgtttagttgttactgtgaataagaataaagggtatatcagtctacttgatgggtctggaaaaattttactgaaagagtttccggaaaaagcgagaatgaatatgtgtggagattctgtcaatgcatattgtaagttcctgttacgagatgaagaggctttatatggtttggggcagttcagagataacttaatgaacttgcggaatgccaagcgggaactggttcagtttaatacgcaagctgcggtaccggttatttattctactggtggttggggattgttttgggataatccttcccggactatttatacagacaatagtaccggtatgagtttggcttctgattacggtaagatcgttaactattatctttttgtaggtgataaaatggataatttggtagctgcatatcgttctttgacgggaggggctccgatgttgcccgattgggctttaggttatcaccaaagccgtaaccgttatgctacgcaaaaagaggtgatggagatagctaaaaagatgaaggaagaggatattcctgcaagtactatctttatagattatcattattggggtaagtacggaacaggttcacataggtttgatgaaactttattccctgatgttccttcaatgttggatagtctccataacgtttatgatatgaaggtggttttgacaatgtggccctgcttcaaaccgggtatccctaattataatgaaatgtcacaaaaagggtatatattggaaggagccaaagctattgacggctatatatatgatacttttaatccgaatgcggccaaaatgtattgggataaggtttcttctttagtggacttgaatatcgatggctggtttttagatggaccggaacctgaccatgtagcctcatacttgccacttaatacttatgccggaccagctcagaaggtacgaaatgtataccctttggttcatgcatcacatttttatgaaggaataaccaaagctcgtcccggtatccgtccttatatgttgacccgttgcgcgtgggcttcccaacaaaagtggggaacggctgtgtggtctggtgatattccaacgacatttgccgaattacaaacgcaagtagcagcaggattaaactttacagcaacgggaattccctactggactacagacattggtggttattcaggaggagacccgtctaaaaaagattatcaggaattgtttgtacgttggtttcagtatggaacattttgtcccgtttttcgttgccatggacgtcgttatccgggagatacgaaagcaccgaatgagttatgggcatacggaccagaagtacaacgtatctgtactgaccttataaagttgcgataccggcttttgccttatatttataccctatcaggtaaagttactcacgagcattatacaccaatgcgcttactggcttttgattttgcttatgatcaaaatgtattagactgtaaagatcagtttatgtatggacctgctctcctggtttgccccgttttggaggcaggagtaacttcccgctctgtatatctgccacaaggatgtacttgggtagatttctggaccggtgcaatctaccaaggaggagctacaattactgcagaagcacctctggataaaatgcctttgtttgtgaagtctggttctatcatcccttattatacttctgttgagaaaaatattaatgttgatgttccgcttgagattcatgtctttggtggggaaaacgcaagtttcaatttatacgaagatgatggtgagacgttgaaatataaaaatggcaattatagtactattccgtttaagtggaatgatcgtacaaaggaatttatagttggagaacgcatcggcgactatgcagtaaaggacagggaccttatcattaaactcaaaggtaaagatgtgataaagaggataaaatatagtggtaaagaaataaaagttatattgaaatgagcctcaggagattgataatagttagtttctttttcttatctttctttgcaaatctttttgcagatggaagtgttaggggatggatcatcctgtctgacaatatggatcgtgctatccggacaataaaaacagcaaaagagtataatataaatcagcttcagttgtcccatgagatcatccatgatttaaaggccattaaagaagaaaaggtatgtgaacaggttaataaactcattcgtcttgcacatttagaaggtattgatgaagtgttgctttgggatcatagcttatactctctggattattatccatcatgttttagaacgggacctaatggtacaataaacttggataatcctaaattttgggaatggtttaaagatgactatcgccggatgctcaacagggctcctgaagcagatggacttgtgctaacgtttattgaaactggcgcttatgcggaaaagcagtactcggtgaatatgaaaacccctgaggaaaaactagcagctgttgtaaacgctatttccgatgtagttattggtgaaagaggaaagaaactctatattcgtacttttgcttattcggaagaagagtataagagtactgttggatgtataaagcatataaagagtgataaggtcattttaatgatgaaagaaacccctcatgatttctttctgacacatccggataacccttatatcagaaagatgaatagacctacgattgtagagtttgattctggtaatgaatacagtggacaaggcgttgttgctaacacatggcctgaatatactatgaaaagatggggtagctatattaactgtcctaatgttaccggatatgttgcaaggacggatcgttatggggataccagcatagtaggaacagctaatgaaattcagttgtatgcactgaagcggatgacggaagaacaaactgtatctccaatgcaaatctataatgaatttattacgtcgaggtatggtgaggatgctttgttgcccattagaaaagcgtttcaaaatgcatatgatatagtcacatctgttttttataccttaggaacaaacctaacagatcattcttctctaaattatgaaaataataaatggggatatagcaggcatgtgtctggaagatggattgatccgcctatggttcttgttaagcatgatataaataaaacatttcattattggaaagatattataaatcatattgctcctgtacactttaagtcattatcatctccgttagctgttgaagtgaagaccgtttttgataatcaatggatagaatctgatgaaaaaatggatagtgtatattataattatattctaacggaaaaacagtatggagttaaacttgcttccgaagcagtcgctgaaatagaaaaggtaaagcctttattagaatctgcgacatataatgatttatatcaactgttttatcgtacttatttggctgcatgtttgcatgaagctgtatgtacggcgtattatggttccagaatctatgtcagagttaagcaatttcatcctgcaggtttgaaggaacgtatttttttatctctgaaaaagatagaacaagtttcgaaggatatgaatttgttggtgaatgcatatcctgtcggtcaatataactggttgaatgatgcaaaaactgcattaaaatgcagagataaggtcttgaagatattgaaggaacatgcttctgaatctgatattactgaaagaagcttatcgaaggtagaatatttctcttggataaacaacactaatgaagggactacagaatcacggacattggccgatttgattttttctgaatggcttcgtcaggaatatgggatgcagttggatatatatgcttttgatgcagggctgattgatggtaagaatatttatgggagtataaattcccaatgatttaaggataaattccctaaagggttggattctacttatctaaaggctaaacagaatggagtacgtttagggctttggggaggaccagatggttttgggatactccggagagtgcagaggaaagaaaggagatgttagtatcactttgctgtaattatgattgggctcttttttaatttgatgcagtttgcggtccgttgagagaagagaaagaagatctttttgtggatatgattggagaatgcaggaaatattctccagacttaattcttttgaatcaccgtttagggttgaaaaagcggaacaatgtactacaacttttttgtgggagggcaaagagagctatattgatgtaaattcattcaatacatgtgcagctcctcacaatagagtaggagcattgggaagaggtcttgtacccgatttgaaaagattaacggaggaccatggggggcctttctgcctgtttggattattgggaagatgaacttgtcttacaggcgtttaataggtctttgttactttctcctcaaatatatggtaatccttggctattgtcagatagagagtttcctaaattggggagaatttttaatctgcatcggaagttttcaggtttattggtagatggtatagaactacctccaacctatggaaagtatgctgtttcgattatttgtttcagatcattctatatgttggtaaagaagcaattaatcttttaatttaatttaaaattaagcgttagataagcgcgatatcactcaatttttaatctcaggcatataattttgccatatcaaaatgataataataggttcttttgaaggtgaaaatacaagattgaatttgagataacaatttaaaaaagataagtaaactaaaagaatacataactttaaaagaaatgcatatgaaagatacaagttaaccggaaacatatccttcctacttatttaatctaagggatacgttatttgatgaaaaacaattttaaaagtgagattatgaaacacatgaaaaacaaatctaattttgtgaaagttagcaaatacacttgttggtgtatgctaatgatgttcttgatggtgcttactccgatgcgtgcacaaacttctcgaagtatatccgggcaggttgttgatgaattaggtgaagctattattggtgctaatgtgactgtagttggaaataagtcattaggtacaataactgatattgatggaaattttactctaacagttccccaaggaacaacgttggaagtttcttacattggttatgtgaataaaaaagtggtagtggataacaaaaccagctataaaattactttgaaggaagatgcagaacaactggatgaggtcgtggtagtaggatacggtacgcagaaaagagtgaatctaacaggagcagtgtctgctattactaatgaagaactggttgctactaaaagccagaatgctcagaacatgttgactggtaaagttcctggtgttcgtgtaattcaaaaaacatctgagccgggtgagtttaccaaccagtttgatatccgtggttttggttctccattgatagtagtagatggtgttcctcgtggcaatttgcaacgtatggacccgaatgaaattgagtcgatttctgttttgaaagatgcttcggctgctatatatggtgtacgtgcggctaatggtgttgtcttgattactacaaagaaaggtgaaaagaataagccgaagattgaatacaacatgtattatggtattcaaactccggcagaaatgttggaaccagtaggtgctgtagatcgtatgagactatttaatgaaaagtcaatgcgtaatctgacaaaccctcagcttacttattcagacgagcagattgaagagtatttgaatggaacattaaaatctactgattggtatgatgcagtaattcgtaattcagctccccagcaacaacataatgtttcattaagtggtggaagtgaaaaaactgattattatgtaaacttcggttatacggatcaggaaggcttttttaagtcaaaagcaatggattataaccgttataatcttcgtgcaaatttaaatgccgaagtcgctaaaaatttgaaggcttcgattaagataaatggtatcattgatagcaaacaacgtcaatacttatcaacatgggaggtttataaagctttgtggcgtgcaagtcctaatgagaaattgtatgctaatgataatccggaatactttcaaaagatgtcatctgaccagctgaatcttttggcagcaacagaccctgatgtttccggttataataagacaacaaataaaatcttccagtctacgatggaacttgaatatgctgttccatttgtaaaaggtctgaaggtgaaaggcatgttcagttatgatacttctatagctgataataccatatataagaaagagtataatgagtatacttatagtgaagcaactgatacttatactgcttatgctatgcagtcgccaactaatctggaacgttattatggtaactcatggactactttatggcaagcttctgtaagttatgaaaatacttttgcatcaagtcataacgtatctggattgctgttatttgaagaagcacatagtgtaggtgataatatccgtgcagctcgtgatttttctatacctttaccttatttatttgcgggtaattctgccaatcaacttggtacagctaatgcaaatggattgacagaaagtgcttctcaggcactggttggtagatttaactatgattataaaggacgctatctgttagagtttgcctttcgttatgatggttcttccaaattcccatcacatagtcgttggggcttttttccaagtgcttctgtaggatggcgcatgagtgaagagagttttataaaagacaaattaccttttataaacaacctgaaacttcgcggttcttatggtaagatgggtgatgattccgttgctgattaccaatttatttctggatatgattatccgaatactgatggtgatagatataataaaactccgaaaggatattttttcaatggatcattcatgaattcattaggttttcgtgctgtagccaatcctaatattacgtggtacaccgttaagactctgaatgtgggtatcgatgctgatttgtggaatggattattaggagtttcttttgatttgtttcagcgtgaccgtgataatttgatggctaatcgtattgccactattccagggacattcggtgctgcaatgcctaaagagaatttggagagtgaccgtacaaaaggttttgaagttgagttgagacatcgtaatcgtgtggggcaggtaaattatagtgtttctggaaacattgctattactcgttccatgtggcgttacaaagaacgcaccccgtcaggtaactcttatgataactggagaaataacttaactaaccgttataatgacatttggtttggttatggtgcagacggtcgttatacttcgtgggaacaaattgctaactctcatatatttgcaggtaatgcaactcttcctggagattatgtttatgaagactggaatggtgatggtacaattgatgatatggatagatatcctatcgctacaactactaattctactgctgctaatttccaggataagaaaaattatccgttgatgaactttggtttaactctttctgctcaatggaaaggttttgatgttaatatgactttccaaggtgctgcaatgtcttatgtatcttatggcgaacagttgtcggctccgctacaatttaatggtaacgctttggatatgttcttggatagatggcgtccagttgatcccaaacaagatccttatgatccttcttgtcaatggatttcaggatattattcttatggtggtacaactccggatcttaattctgaattctctattcagaaaggtacttatctgcgtttgaagactgctgaaataggttacactttgccgaagaattgtttgtcattcataggtataaagaatctgagaatttatatgaatggatataacttgttcactataacaggtgtgaaaggtgtcgatccagaaagaccagctgaactctatggatatatgtatccgttgaatagaacatataactttggtgcaagtgttacattttaagtaaaaggagattatagtatgaaaaagctaagaaatatattgatgtgtgttgctataggaggtatgtttgtaggatgccaagatttggatattcctcctaagaatattctgtcgggagaagacatatataatgaaggtggtattactgcctatatggctggtttgtatagccagttgccgatggaagattttaatatgtcaaatgatggtagttacaatggtttttataattggaattgtattatttgggatatgctcagcactggtgaaactgtaaatcgtaataacacaggtatttatattcctcaaaaaggatattggagtatgggttataaaacgattcgtcaagccaatgatttaattgccaatctgcctgcgtatgtcggaaaactgaaaggtgctgaatcatggattgctgaagcaaagtttattcgggcttatgtatattttgcgatggtaaaacgctatggcggtgtacctattttggaaaccccgcaggaaatgactaatgacgagaaggcattgtgggtagcgcgtagcagtcatgaagagtgcatagactttattctttcggatttagattatgccattgaaaatttaggtaaaacaaaagttgcaggccgtgctaataatacttatgtggcagcagcttttaagtcacgtgttgctttgtatgctggctctgttgcccgttatggacagacatttaattattctggaagtgaaagtggcaaaatgcttactggtattcctgaaggaagagcaaacgattactttatgcaagcctataaagcatccaaaattgtagaagaaggtggttataagttatatgagggaaactctgataaagaagccaacttccgtgagatatttgccaatgctgataagagtgatgaatctattcttgtgcggcagtatagtaaaaatgactttgttcatagttttgatgctgtatattgtccgcctcgtatgaccgcaacttatggtgaccgttataatgtaacattggattgggtagaactgtttgacggtctgcctattgatcctgcaacggggtacctcaaaacaacggatgacgatggtaattatattgtctacaatgatgttaaagacctattggacaatgcagaacctcgtttaaggggctctatcttattacctggacatacttacaaagggattgaactggatattcgttttggtataataaaggaggaaatagatccatctacgcctattgccaagtttataaaggatgatggacagactacagtcaattatacaagtaatgcttggttcaagaataacgttttgacaacaaccgagaatgtaaaagaacaaaagccttatgagacttctacaggtatgaaacttaataaaagtggaatggatggtccagctaatggtggaacgagtaatacactgacaggctttcatggagctaaatggttaaatttgaactggacaattgccgaaacacagttacatagttctacacagtcttggattgatattcgttatgctgaaatattattgaatcgtgccgaagctgcattggaactttaccagaatggcgttgctactatcgatggaaaagatatgcaacaggatgcttacgaatgtatcaataagatacgttcaagagctggtgctgagttgctgaccagtcctgcagaactatccaatgtatcacgtgatggcattgaacgtggtcaaggtatccgttcgtttgtatttgctcctaatgaaggtatgcatattatccgtgtagaacgttataaggaattggctttcgagcataagatttattgggatttgcgtcgttggtttactttcgattcacaaatttatcaatatcgccgtagaatgctgtctccattcttgtttgccaaaggagcaacagtaaatgaagcaggtaatccggtgggtaagtatatttttgatacccgtgtttgtgaaagagctaataactcattgacatttgctactaaaaattactatgataagattcctgatggtgaacgtaaggtaaatccgttacttgagcaaaataatcagtattaattagaaaaaggaaaatagtatgaaaaagatatttaatttgctgttagttactgcattagttttaggcttttcatcgtgtgaaaaggataattatgatgcaccggaagctggtgtcttcgggcaggttgtagaccataacggtaaacctctgcaaacagctatgggacaaggaagtatgaagatacagattacagaattgagttatgcgggtggcgatgaatcaatcgttgtgacgaatcagaacctcaatatgaggcaggatggttcatattccaattctaaactgtttgcaggtacttaccgtatgattccgttggaaggcgcattttatccttatgatgtagaaggagaaacggtggaattgaagaacgggaaaatgacagaacgtaactttactgttaccccctatctggaagtagaatgggttacggaaccttacttgacttctgataatttcttgaaatgtgcagtgaaatttaagagaatagcaaaagaaggaattgctatgcctgatgtcaacaacatacaattgtatatttcgcatacgcaatattgtggaacagaatctgacggaaattatactcccggttctgtgaaaataactaatgatcaggagggcacaactattgagttgacttctaaagctgctattaaatattccaatacctattgggtaagagtaggtgcgtgctgtaacgacacttacaagaagtataactttactgatatcaagaaaatcgatctgaaattgaattgattaaataagtaggtaggtaagtaaggagggtatttgtttccgtaataagtgccctccttcttttttgaacaaaatattagtactgctttttgggcataaactcttttagggcgtatcagggtcgtactttcttcgctcttatacacaactaaaaatagtgaagctggtacgaggagggggtatatatgatacaaagcaactcattttgttctatttgtcggttgtaaatctggttaggggattgcaccttatattgaagctgattattatggcaacataacatagtttaaaagtttattggatggtttgtaatggtaccagccatgattaattactttttaatgtctaattaattatttatttcactttctgttaatgagtcgaagctacatttgcagaaaataatattatattttaatatcatgaagaatttctgtatagcattttggactgccgcatgccttttgatttcatcatccggatatgcgcaatctgaatggaaaaataatttctctgatcaaggagaaatactgaaaacagtgggacggggtgaatgtagcattgcagacggggtgttccgttcaaaaggttcttatgcttgtttcggtaatcctgagtggaagaactatactatgtcttttaaagcgcgtgcaccaaaagaagcagaacaagttcaaatttgggctggttttcgtgccaacaaccgttttgatcgttatgtagttggtctaaaaggtggattacaagatgatttatacctaatgagaatgggatatatgggtactgatgaatttatgggagttcgcccgttaggattccatccagtgccaggtcagtggtataaattaaaggtagaagtatgtggtagtcgtattcgcattttcttgaatgatgaaaaagaaccacgtatggatattacagataaaaatagcaatttagcaccctccggtcctgtgactttgggaggaggttggattgaaactgagtttgatgaccttgtggttactcctctgaaagaggatgcattgaaggatgtgaaggttgcagaatatcgtaaggtagtaacaccacaagagaaggaaaataagcgtcagcttgagagagcaaactatacctctgttaaagtgggtgaactggaggaaggacgcacggatatttcgttgaatggaaattggctttttatgcccgaatatcagttggataacaaagaaaaagcaatatctactacaacggatgataaagattggcatgtaatgtctgttcctaatttctggaatcctattcgtatttggttacatggcgagactatgccttcacctacaggagctcagcctaaaggagtttcagatacatactatcagcaagaaacagaacgttgtgaaggttatacttttgattataggaaaacaaatgcagcctggtatcgtcagtgggtggaattgcctgctaatattgaaggtaagaacatgactttgactttcgatgcagtttcaaaggtagcggagatttatattaatggggaattggctggctcacatatcggtatgtatggtgaaatacaggtagatggaagcaagttactgaaacctggaagaaacttggtggcagtgaaagtgacacgtagagcagatggcagttcttctgaaagtggtagtgctgctattgattttttctattcttctgttcgtgaaagtgaacaagaaggcggaaaagtgtctgtaaagagtaatatcctgaaagatattgcccatggcttttatggtgatgatcctgcaggtatctggcaaccggtgaggttaactattaccagtccggtaaaagtagaagatgtatttataaaaccaactttagagggggctacttttgatttgacagcgaagaatcatggcagtaagaaaagccagttcgatctctatactgatgtcatagataaagaaaccggttcactactttacagtggcctttctctgcctaaactgatactaaatgctggtgaagagaaggtgtttacttacagtgtgaataatttgaaacctcgactttggacgcctcatcatcctaatttatatgacttccgctttcgtttagttgctgccaagggtgctgaattggattgtatgacagagacttccggtttccgtactttcgaagtaaaagaaggattgtttttcctgaatggtaatcgctattggttacgtggtggaaatcatattccgtttgctttagctccaaacgatctgaatctggccaatactttcatgcaattgatgaaggctggtaatatggatgtcactcgtacacataccacgccatggaataaactctggatgggagctgctgacaaaaatggtattggggttagctttgagggtacatggccttggttgatgattcattctacgccgttacccgatgcaaaacttattgagatgtggaaaggagaatttctccgtctgttgaaaaagtatcgtaatcatccttcactactcttttggacagtgaataacgagatgaagttctatgataatgacaatgatttggaacgtgctaaagagaaataccgtgtaatttcggatgttgtgaaagaaatgcgccgtatagatcctacacgtcctatttgctttgactctaattatcaggctaaaggtaaggataagaaatttggaactgactttatgaatagtatagacgatggagacattgacgatatgcatggttattataattggtatgatttctctgtatttcgcttcttcaatggtgaatttcaggaacggtataaaatgccggatcgtcctctcatcagtcaagaaatgtcaactggataccctaataatgaaacagggcatccaacacgttcttatcagttgattcatcagaatccacaatcattgatcggttatgagtgctatgatttttctgatccgaagtactttcttatggtgcagtcgtttattacaggtgaattagccgagacacttcgtcgctccaatgatcaaggatcgggcattttacactttgcattactcacctggttccgtcaggcatacgattatcagaaaatagagccgtatcccacatactatgctctgaagcgtgctttgcaaccagtgctggtaagtgccgaattgtgggggcgcaatctgtatggtggcgataaactctctacgcgtgtttatgtagtaaatgatcgcgaggatggtacagagctgaaaccaactttgctgcgttgggaaattcaggatgaagctggaaagaaactagtttggggtagtgaagcagttccggcagtgaagcattacggacgtcattatattgaaccaaatattcagttgcctaccaatttaccagctgacaagatcaacgctaaattagtattaaagttgacagagaatggattacctgtatctgaaaatgaatatcatttagtgttagctcgtaaatcctggaatatgaatcagatctcagaaggtaagaaagtgcttcttttggataaggatggcatgaaagataaacttgatttcttgcatgtaaaatatcaaacggcatcttctataaaggaattggttaattctaaactgaaagctgacctttgcattatctcaggattgactgaatgtacagatgaagaaaaggaattaattcgttcttatcagtcaaggggggggaagcttcttttgttgaatagtaaagaggttgcaaaaaacatctatcctgagcatatcacaggttggattattccgacagaaggtgatattgtgaatatggaacgtaatgatgctcctgtgttcgatggtattgatgtattggaactacgttattttaacaataataagagagaaatccccttggcttgtaatgctactctgaaaacgaaccggaatgaaaatttgatagagttggcggggcagatgaagatacatgcttatattgatggaggcaaaccagaagaccgtattcgtaagatagattcgatgaggggctttactttactccaaataaaggatggaaagggattagctactgtttctacaatgtgtacggaaaaggctgatacagatccgatagcaggaaaattattggtgaatatgatctcagatttgttgagatagcggatattaacatttaagtctgtttaaactattacagtcaaaatactatgatgaagaaatatcttgtaactttttgtttgagtgctgtagccatttgggctacagcacaaaatgagccttatagaaatccgaatttgtcaccttcggaacgtgcttgggacctattgaaacgaatgactctggaagagaaaatcagtcagatgaaaaatagttctccggctattgaacgtttgggaattccagaatacaattggtggaatgaagcactacatggagtagcacgtgctggaaaagcaactgtttttccgcaggcaatagggcttgctgctacttttgatgatcaggctgtttatgaaactttcgatattgtttctgatgaagcccgtgccaaatatcacgatttccagagtaaaggcgaacgagatggttacaaaggattgacattttggaccccgaatattaatatatatcgtgatccacgttggggacgaggtatggaaacttatggtgaagacccctatcttacctcccagatgggattggctgtagtaaaaggtttacagggtgatggtactgggaagtatgataaaacgcatgcttgtgcaaaacattatgcggtacatagcggtcctgaatggaacagacatagttttgactccaaaaatatttcccaacgtgatttgtgggagacgtatttgcctgcttttaaagctttggtgaaggagggaaaagtgaaagaagtgatgtgtgcctataatcgctttgaaggagaaccatgttgctcgaacaaacagttactgattcgtatcttgcgtgaagactggggatatgacgatatcgttgtttcagattgtggagctattggagacttttattaccctaatcatcatgaaacccaccctacagcagctgcagcttctgctgatgcggttgtatccggaacggatttggaatgtggcggtagttattcttctttgaatgaggctgtgcagaaaggactgatttcagaagaaaagatcgacgaatctgtgtttcgtttattgcgtgctcgttttcagttaggtatgtttgatgatgatacgctcgtaacttggtccgaaattccttattcagtggtagagtcagaggaacatgtgaccaaggctttagaaatggcgcgtaaaagtatggtattgttgactaataagaacaatgtcttgccattgactaagtctattcgtaaagtagcggtattggggcctaatgctaacgattcagttatgctttgggcaaactataatggtttcccaaccaaatctgttacgattcttgaaggcattaagaataaacttccagaaggagtagtgtattatgaaaaaggatgcgattacgtgaatccccaaactgtattcagttattttaactgttgttcctataatggtaagaaaggatttaaggcaactttctggaataataaaaaaatggagggggaagctgctgctgttggtcactttagcgagccgcttaattttggtaatggtggtaataccgtatttatgccgggggtaaagttgaataatttctcagcacgttttgaatcggtatatattccgaaagaatcagaagaagtctcttttattatttctgccgatgacggttcacgtttgtatattgatggcaaagaagtatattcagattggcatgatgggcctgcaaaagagcagatatataccctgaatgcagtgaaaggtcaaaagtataaggttgtgttagagtattttcaagctggtggagaagcctcattgaagtttgatataggtatcaaaagagaaataaattataaagaagtggcggataaagcggctgaagcagatgctataatctttgttggtggtttgtcttcctcattggaaggtgaagaaatgcctgtggatcttcccggtttcagaaaaggtgaccgtaccaatattgatctgccgcgtgtacaggccgaaatgctgaaagctctgaaaaagacaggtaaaccggtaattttcgtagtatgttctggtagtacactagcattaccttgggaagctgagaatctggatgcgattcttgaagcatggtatccaggtcaacaaggtggaacggctgtagccgatatcctgtttggcgactataatcctgccggacgtttaccacttactttctatgcttcaaacaatgatttacccgactttgaagattatgatatgagtaaccgtacctatcgttattttaaaggtaaagctttatttacttttggacatggtttgagctatactacttttgattatggtaaggcgaaggcagataaaacggtccttcggataggtgaggggatggttttaacaataccattgaaaaatacaggtaaaatggctggtgacgaggttatacaagtctacttacgcaatacaggtgataaagaaggtcccattaaaactttaagggcttttcgcagggtcaacttaaaagcaggtcaggcagaaaatatacgttttgaattacctgtctcaacatttgaatgctttaatcctgcaacaaaccgaatggacattcttcctggtaagtatgaactactttatggagggacttcggatgagaaagtcctacaaaagttgacagtgacattgaaaaagtaaaatatgttctcctataatctttaatactgatatgaataaatatttctcactgttttttgtcttttatctgctttgtggcttttctgccaatgcaggagagggaagatatactatcccattgacgggaagtggctggttgttatggtttgataaagaagcagagtggcagaatgatcggctttatctgcctaatgaaatcacagacttgtctatactacctgtgaatgaacccacgggtggttggcaaatcttaaatcataatcctaatgctgttcctgttgaggtgccgggtacggtagaggaatatcttaccagtactgataatcctcgtccggaacacttccggggagttagctggtggtaccgtaaaatcaagattccggcagatcagcaggagaaacgctttatcatctattttgaatcagtccgtatgcgtgcggaagtttatcttgatggtaagttggtagcttatgacttgattggtgagactcccttccatgtagatattactgatgaggctaaacctggtacagagcagttattagcgatacgtgtaactaatcccggaggaaatttccattggcaggatttcgatatattgaaatggggagagtacaacattcctcctgcaagaagtttcagtggaataattggcagagttaagttggaaagcgtgaatccggttttcatttctgatatctatatgcagaatactccagaactgactaaggtgaatgcaatcatatcttttaccaatgaaacactttccagcgtgaaacagaatgtagaactggtagtgaatgaaaaggctaatcccgataaagtagtattccgacaaactttgaagaatctctcttttcctgtaggaaaccatgaagtaacaattcctgttaatgttccagacgccaaactatgggatctttctactcctgaattatatacatgtaatgtacaaataaagaagggtaagaagacgcttgaccaagataagaaagattttggattccgttggtttactgttgatggaattggtaaggatgcagtattgcgtttaaatggacggcgtattatgttgaaaagtgcaatcagttggggatatttccctgtgacaggattaattgcaacaactgaaatggccgagaaacaagtgcttacagctaaaaaactggggctgaatatgctgaactttcatcgttgcataggtagtcctgttgttcttgaaaaggctgacgagctagggctgctgtactatgaagaaccgggttctttccattcggctaatcatgatccgtttatccgcactatagtaaatgagaagttgaagcgaatggtttatcgtgatcgtagccatccgagtttagttatttttaacctgattaatgaatttggtggtccattgacgaaggataaggcacttgtagctaaacgtatgaatgatatgcgtgaggctcatgccgtagatcccagtagaattatgacatttacatcgggttgggcaggaagtgaagataaggaagaggactcaaaagcgcatatgttaccttttgacaccactttatatagaaaaggctggtttgataatcaccgtgcaggaggaccggaaacttatatagaaagctattataaaggtcctaaagacaatctcatgtataccactaattgtacggaagtatatatgagaggtgaggaaggagccatttctactcctccacgtattcagttgattcatgataaagttgagagtacaggtaaaactggttgggatggacttttctggaagagtcagtataaagcttttacagattattttcaggctaaaggacttactaatcactttgctactcttgattctttaactcgtgcaatggggaatgtctcttttgagcatcagggaagacgtatagaaggtatgagaatgcaaaatcttggtgatgcctatatggtaaacggttgggaagcaatgccttatgataaccattctggtattgtggatatatatcgtaatcctaaaggcgatgcttctatattagcatactataaccagccgctatatgtagccgtggcctcacgtaatcaagtggttaaacttcctggtactgcaacggtagacttttatattgtaaatgagaaaaacttgaagggtgatcatactcttgagattaaggtgattgctcccgatggaaaagttgtttatacccaaaatgaaaaggtgaatatcgaagggggagagacttttggacagcttctattggagaatgtagaaatacctattgataaaacagaaggtacttatcatataaaagctaatataaaagccagcaatcagcagatatgtgcccaagggcacgatgaagtagttgccgtaagttgggaagctactgatttggcaggtaacggcgcgtattacggcggtgaaaatgataaagttgctgctttctataaagaaactaccggtaaagaacttccggttttcacaccacaacaggctgcattggattggctcattgtcaaccgttcatcattggatgctccggtagctgttgctcctaattactttcaggataagacgggaaattctactttgaaagttacttggtattatgataatgatatgaagtctgttgcctctgtaaaatctgatacagagattaaccggacttttgtgggaggtgcccaaccggatgaatccgttccggctaaccaacctttttccgttgtgtgggaaggtgacatatatccacttgagtcaggacaatatttactgggagtggagacggacggtggtgtgcgtttgtatgttgacggattacaattgatagatgactataataatagttctctgataaagcaaaatcggccggttgttatggaagcaggtaagccggctaaaatccgcttagaatatcgacaaggtggtcagggtggtcaggtacagttgaagtggtctcagccaagtgcaactactattgctccacaaaaattgtttgatcgtgtgaagaatgatggaactacattgattttgctcggtgcaactgaaacttggatgcaagctgtagcagagtatacaaatactgtatatagtggttattacaatgttggaaagaattgggttggtggtattcattttgttaaggaacatcctctattcgatgggcttcctgtgaatgatgctctcaactggccttatcaatcggtagtgaaaaatggtgaccgcagatttggtttccgtatgcaaggagaagatttggtggttggttcttatcgaagtacgccatttgagttgggaacagcagtgggagttattccatgtggaaagggaaaaataatattctcttcattggatattgtagataatttggatgatccttccggaccggcagaagtagctcggaagatattgtgtaattatgttaaatactctttatatcagtagtcttgccactttataacaatcaataattatgaatcgaaatagcagaatgacaaaattatttcctaagttgtggataacggcttcaataactctgatgacgatgtttcccatgaacattgcttgtgcgcaaacaaaacagcaagctccacaacaaagtattaaaaccatttatccaacaaaggattgggttatatctgactttgttgtgaccgagtttggagctaaagctgaacctggatttgataacagggttgcctttcaggcggctattgatgccgcatataaaagtggtggaggtgtggtatatatacctgccggaaattacgaattccgtagcacacaagttggtactaaaaatgtcagagttcgccaaggccgctcggaaacaaagacagatttccatttcgagtatgttttacgtctccatcctggtgtacagttacggggagattgggctgatccggaatctaataatggaaaagtccttggaacgattctcgaagtgcgtgtcggtaaagattcaccgaattatgatggaagcgttgaaagttggtggaacgatgggcaagcgggaaatgcacttcgcacaacctatacaagcatagctgatagattcatagaaatgaatgcgggaaccggagttaccaatctttccatctggtatcctgaacaagatattaataatgtaaagccatatccatggacgctgtttcagactcagggagattgtgctacgatagagcatgttactcttgtgaactcttataatggtttcaattctgcaccgagtgagttgcattatgttttgaacagctacatgactgccctgaataaaggtattgaagtgcatgtatgtactgatatcggtcgtattgaaaatgtcagtataagtcctaagtattgggctaattcaggtcttccgggatctccctctctggctgctgtaacagcctatacaaaaacgaacggaacagggtatcaaatgcatcgttcggactgggaatatgtttcttacctgcatgtatcaggttacaaaactggtgtgtggataggacgtgaacccggctttgccgatgcaccgaatgctcagttgtacgaggttcatgtagaagattgcggaaacggattatatgttgaggatgtcaacccttatggtatacttatttccaactcttcattcagtgccaataaaggggataatgctgtgtacttttacaaggattttagtacttccgtacaattcaatggagtgaatttcagtggagctatcgtaggtgatggtgcagatggagtcgtatcgtttgaaagttgtacatttggcgaatatagtgattatgcccttaagatgaatagcggtaatgtattgttgtctcagtgtgattttaaaaagaatatcgggcatatatatcttggcgcaaatatgcataatttgaaatctgttaattcaggctataaaggcaggctgaagattgataatcaaagtacttctgctaaagtagaagttgtcacagggcaaaaatatgctttcgcccccattcctaaaaacataaagacaaatatagacgtacatccaaggccggcatcagataaagttttgaaagcagatttagcgaaagcaacaggttttaataataatcgtccggtaaaagatatatcagcagaactgcaatctgcattagatgctgtgaaagctgctggtggaggtacgctttatctaccagctggtagatatttggtggataatcctattaaagttccttcgggagtggaattgagagggtcatgggatgtacagcatcatacacaaagtggagggactgccatattcaccaattatgatggtggagctgcgggagaaaatggttcttcgctcatacaacttgaagctaatgcgggtatcagaggtattacgctggcacaactcaatattgcttctgacggtttcagtgttgataatccgagaaagactccattcttgatacaggggcaaggtccaaaagtgtatattgttaatgtaaccatagctgtaggtgataaaggtatagacttggcttcatatgatacgagtggacactatgtcgattatctgggtggtgtacctttaagggcaggcatttgggttggcggtggagccgaagggggattcattcgcaatatgcagctaaatcctcactatggatcaaggcttccagaaggagggcagggatatccggcagtatttatgatgcgttttgtacaatccaattgtagtgcacttaaatttgcagacgttaagaatcagactattttcaataacttcgtttatggttcggtatacggaatacattttctgaaagatgcaataacaggcaagtatccgggggaaatgactgttatagggcatggatctgacggatgcacttattctttgtttgtggaagatgcagataagaatactaagatagttgctattaactctgagttagttaatacaaagattccgaatgaaccggtcagatcatatgttcttatgggagataaagtcaatactgataaagtacatccggatgccaaactaatcttgtacaatagtgcattttggggtagccctgtttttggagcaatcataaacaatggtattgtatcctttcaacaagctaacttctcccgttccggtacacaaggagtagatgttagaggtggaaaagcacatgtgttcacttcttatttcgctcaaaaaatagtagagggaactaacggaagtgaagggtatgcaagactgggcattcagggtaaatcgatagagtttaccaataattattatatatccggcttccggtttaataagtctggagaagggctgatttatggttccgataagaaataagtgttgtgagacagtaacttcatttacatgctgaggtaaaggtcgttacataccgaggtaaagagcattacaataagtggtaaaagtcgttacatgccgaggtaaacacttttacatcgtaggtgattaattgtaaatgctatctgttgataatcggtgagttaacgaaatgtgttggcaaggttaattcgtttctatttaagaacggattaattttgccaacgctattttaaatatttgagacctattgtgttatctttaattttttaagtatgccagttataactaataatatttcatttaagtgctgcttgttgggagttattttcttgttttggggagtagttgatcttatatctcaaacggtagtgtttccacgtgatttttcaccagctgagggcttggtcactatacaagagaaaccttttcgtgatgaagtatgtttgaatggactttgggaactgcaatgtgttcccgtaccttcttcttggaaaagtggttccggagtagctcctgaactatcgttaccacaaccagataaatgggaaaaagtaaagataaaaattccttctgccattaatgtaaacgactggggaagaggtagcaatgtggggaatggtacacaaaggccttatgtcccgagctccgtttattttccaagttatccggaacattggaagcatacccgtatgggatggctgaggaagaacttccgtattccggtagagtgggagcagaagcgtgttttacttcattttgaggctgttgctggagactgtattgttttagtaaatggtcaggaagtggggagcaattttgactctcatcttcctttcgatttggatatttccagctatattaatcgtgatgcagagaatgaactgttggtaggtgttcgtcatacaaaattatttgataagtcgcatcctttatataagaaaatgggagctacttatcctacaggatctaatacggatgatttgattggcatctggcaagatgtatatttacttggagtgccggaggtgaggattacagacgtgtttgtgcaaccttgggtagataagaacgaactaatattggaaatagcaatgactaaccttactccaaagaataaaaaaatcactttaggtggagtggtgaaagaatgggtcaaccatgctggtaaggatgtattgacagctcctgaaatcagttggagtttgggagaaactgtgcttaccataccttctgaattcgtaatacttcgggcaggagagagtaaaacgattacggtccgtcatcaggtgaatgatgtattgaaatactggactcctgatactccttatctatatactttgctgctgaatgtaaatgataagaagcaaacatatgattgtaaagccacccgttttggctggcgtcagttcaagatagtaggtgatgaatttcagttgaacggcaagaagatacagtgttttggagatatacaacatcctttcagtgcttatatctgttcacgccgttttgcgtatgcatggtatcagatgataaaagatttcggcgggaatgcagttcgtccacacgcacaaccttggccacgcgtctattatgacctggcagacgaaatgggattgatggtattggatgaaacggctttattcggcagttccatccggttgaactttgaggaggagctaacctggcaacgttcgcacgagcatctgaagcggttaatcttgcgcgatcgcaaccatccgtcggtgataggttggagcgcagggaatgaaacattcgctatagccctgctgaataaaccagaaaaagaagtagctgctgtttgggatgacaagctggtagatttgacattgagtgccaggaaatctgatcctactcgcgactttattacattggatggtgaccgtgatatggaaggacgcctaccggtgtggagtaaacattttgcgcatggccttaagttggaagatctgcctcgaaacctgaataaacctctgattgtaggagaatcaggtgctacttattacggacgtcccattcaattgtatccctttgtaggcgaaaaagctttcttgtcttatgaaggccgaagcgaagcattggcgatagatgtctatcagaatgcaaagcaaatggcgcttccttatctgtcttactattctccgtctgaggtctgctggtttggtctggaacacatgaatttgggatatcatcattttgagcgtttgcccagtctgacagatggtatttttgcaggaaagccttatgaagaaggaaaacccggttaccagtatgagcgcataccgccttatgtaactacgtttaatccgggattagatccggaacttcctttgtataagcctctccctatgtttaatgctctgaaagctgcattaaccggcggtacatggacaccttatcaagaagtgaaacacccggcaaagcctgagttccctcttccgctttatgaagttgcctgtctgtttggaacggtacagccggaactgattgatttcataactcgggcaggtatttctctgaccgatatgccccaaaaagcaaatttatggattatagatgccgaggttgtgacagctgaagacttacagaagatacaaccgatattgaaaaagtggcagaagaaaggtggaatgctgcttgccttaagttccggtgtaaaacagagtgaagccttctgcaactggttgccggaggaggtgaaactgacagatcgtcgggcttctgctttggaaaccgataagaatacctcttggggaagctattttgaacttcccgatttgtacttcagcgagatggatggtgaccgttacattctgaaacaaggattggcgggcgcattggtagaaaaagggaataccatattccgggcgtcacgtacagactggaatttgttcaacaatgtacccgaacattggaagtgcgctcaggtagtactgtatgaagctatggagaaacccgaaggtactgctttggtcacttatcctttagacaaggtcaatctggttctttctgctattgattatcatttgtggacgaaagagacagatgttttctggagaaccttgttcaaagtgatggggattgatatagataagaaagacgttcaaaataggaatgcaaagaaaaaagagcatgatttattgatggatggccctacagattgataaaaacgctattaatgtttcattttaattgaaaattaattgtcagataagcgcaatgtacctgaaggtttaatttcccacctttacttttgcagaaagatgaaagaataaaaactggtagaaagttttataaataatagatataaaagataattcattatgaggaataagttattcgttacattgggtatactgggtatgagtctgttggcttatgccggccccaaacactctcaggaaacttcttatccaagttacaaaggattgataatggcgggataccaaggatggttccgtgggccgcaggatgggaccaatcaggggtatggtcattatggcaccggaaaactttttgatgaaaaacattgtactattgatgtatggcctgatgtaagtgaatatccgaaaacgtacgaaacttcctttaaacatgctgatggaagaaaagcgcgtgtgttcagttcggcggatcaatctactgtggatttacattttaagtggatgaaagattatggagtagatggggtgtttatgcaacgttttgttgggtatacccgtggtaatcaggaaaactctgtacctaaccgcatcttggcaaatgctttggaagctgcttcgaaatatgaccgtgctatagctgtaatgtacgatctgtccggattgaagaaatctggcgaagactgctcgatgattattgaagactggaagcgtctggtggataaactgaaagtaacgaatcaagtgggtaaaaagacttatttacatcataatggcaagcctgttgtagcaatctggggtgttggtttccccgaccgtccctataatgtcaggaatatcggcatggaacgtttaattgacttcctacaaaatgacccggtatatggtggttgtacggttatattgggtgttcccactttctggcggaatttagagtcagattgtattaatgatccttatttgcatacaataattaagaaagctgatattgttttaccatggacagttcagcgcttttctcctctgctacataacgatatggaccgttatcgtgatttggttattggagacattcgttggtgtaaagagaatggagtagactatgttcctgccgtgactccaggatttagctggcataatctcagtaagttggagttcccggatgatgtgaagcctgtcggtagtattccgcgtcaaggaggacgtttctattggcaacagctttcaacagcaatgatggcaggggctgaaatgatatatgttgctatgtttgatgaggtggatgaaggtactgccatatttaaatgtacgggagatcatccggttagtgatacagccaagtttattgatatggacggacaaccttctgatcattatttgtggctgacgggagaagctgcccgtatgcttaggaaagaaataccattgacatttaagctgcctgtaagaaattaagctatgaaacgatatcagttgatgatggctttacttgcatccttactgtttctgacagaagggatgcaggctaaaataacgttacccgcttttttctcggatggaatggtgttgcaacaacaaagctctgttgctatttggggaaatagtgataagaaaaaacaaaaggtcacgataaagacgtcatggaaccaaaagaaatgtgcgacaatcactgatgaattagggcaatggaaagtgaaggtggaaacacctgtatatggtggtccttatagcatagaggtaagtgatggtgaaacggtaactattaatgatgtattgattggggaagtatggctttgttcggggcagtctaatatggatatgcgtgtaggcgggcgttatagcgacccggtgattggttcgttggatgctatagtcacttctgaaaatcctgaaatccgtatgttcatggtgggaagtaaaatgacttccgcacccctgactgattgtgaaggtatttggcaagaagcttcttctgaaacagttcccgacttctcggctgccggatatttttttgcacgtaagctgaatgaggtactcaggataccggtggggattatccatgccagttatggcggttcgcgggtagaggcttggatgagcaaggaagcgatagaaccttacaaagatttagaggatgtacacaatgcttccattctctataatggaatgttgagtccggttgtaggatatggtatacggggttgcctgtggtatcagggagaagccaatgtagatgctcccgatttgtatacccaattgtttccgtcattggtaaatgattggcggaagaagtggggaatgggagaattccctttctattatgcccagatcgttccattcaattataataaaggtgaaggaaaaggaaagaattcagcttacctgcgagaagctcaaacagcatgcttgaaattgattccttcatccggcatgatcattctgactgatattggcgatgcgcgtactatacatccgatggagaaagaagcggtaggcaatcgctttgcatatatggcgttggggcggacttatggtaagaaaggttttcctactaccggtccgttatataagtctatgcagacggaaggaaataagataactctgtcgtttgatgaaatgggcaagggattgactacgtatcgccaacaattgacagggtttgaggtagccggtgaggataaagtatttcatcctgccaatgcacgttttggcaaggatgcacaaacggttattgtttcaagtccggaagtggaacagccggtggctgtacggtatgcttttaaagattatataaaaggtactctttataatatgtccggtcttccggcatcttcattcaggacggataattggtaatatatgcgaataaaattatatagattgaacaatgatgaatagatacattctttctttttcgcttcttttattcctttcggtagcttctatgctaagagcgcaacagccccgattagtagaggtaggtaaaggatatagctgtacgtcggtcaatactactatatttcgtcacaattctttggtgacgaaaggtaacacgcagtacattagttattacgatgcagatggatatctggtactgggtaaacggaaattgaaatctgatcgttggacactgaaccggacacagtataaaggaaatgtgaaagatgcgcataacggcattagtatgatgctggatggtgaaggctacctgcacgtctcgttcgaccatcacggtcataggctgaattattgcaggagtgttgccccgtattcattagaattgggtgacaaggaagctatgacgggagtggacgagggtaatgttacttatcctgaattttatttgttgagtgggggcgacctactttttgtctatcgttctggatcttcaggcaggggaaacctggtgatgaaccgctattctgtgaaagaaaagaagtggtatcgggtacaggatgttttgattgacggtgaagaacaacgaaatgcttattggcagctttatgtagatagtaaaggtacaattcatctatcttgggtatggcgtgaaacgggaggcgtggagacgaaccatgacctttgctatgcgtgttctttcgataatggtgtgacgtggcaaaaggcggatggtgagaagtatgaattacctatccgtgctgacaatgcggaatatgtctgtcgcattccgcagaactcggggctgattaatcagaccagtatgagtgcggatggtgatgggcacccttacattgctacttactggcgtgcttctgacagtaaaatacctcaatatcgcgttgtttggcatgatggtgaggcatggcatattcgtcaagtctcagatcgtaagactcctttttcattgagaggcggcggtactaagatgattcccattgcccgaccacgaattgtggtgcataaagagcgtgcttattacattttccgtgatcaggaacggggaggcaaagtctcagtggcctatacaccgtctataagcagcggtaagtggagtgttactgacttaacggacttttctgtggatgcttgggaaccgtctcatgataccgaactttggaagcataaacatcgccttcacctttttgtgcagcgtaccggacagggagatggagaacgtacagtggaacttgccccacagtcggtgtatgtgttggaagtgaataattaattcggatgtatatataatttattataatggcgaattctctttaatccttgctcagaatactttctggaagggggaataatgagtataggactgaattaggttaagtataggactgaatggcattcagtatacgactgaataagattcactccgggataatgaaatgaatttcgtccaggatcatgtaaattggtaggtattgtttaccttaaaagcattcaccgaaacctagaatgccgtgagtactgtacctttttcaacaagtgattctttggttttgtctgaactgcacagatcaatttattaatggtttaaaaactgctctctagatagggagcgcaatttatttacgtatgaaaaacagaaagaatttatttagaatagcttgtgccgcattgttcctgtttactggattaccccaaaatagtcgggctcaagaatctcccaaagagtattggaacatacgtactcaattaaccccattgcgtctccctcctccaccggttggttataaaccggagtacctggatctgaacggagacggcaaaccggatgccataaagtccgtcacccacaataatatccctatcctgtggctggacgatgacggcaatatgaaggaaggtgacctggaaggtgatatggtaaacgactgcctgttgattgaccgtaaccgggatggtatttacggaggtcagggagacttgatcatcgactgggtagatacagacggagatggaaaagcagatatgcagattgtcattgaatacccgaaagaacgtacaggggaagtatggcctaacggacattatatgataatgctcgatctggaccatgataatgttttcaattatatcaattggaataactttactcttcaatgttgggatcgtagcggtttgtccgatttctatgaggactatagtggtcagtctgctttcatgaagatacatacttctacgtatgatatgaaggatttgcgcttgaactgggaaaatcccttcttgttctatgatccggataaagacaataggacagaaatggctattcgtttattggattctccgaaaattcatgatccgaatgctccctctaacagttatgtgaatcgtcaggtagaagggcggatagactgggtttcgctctctgtggatattgataacgacaatgccactggtaatgagtttgactttgatttcactatcggtttccagggcgaaggttttgattatatggatcaggttcaccctatcagaaacctgcgtggaatgcccgaggctgataaattctttatggacccccgttatcgtcaactgacggaattaatatatccggatcatgacagtgcccaagaactgatcttccagcgtggcaagtggaaccgtatcaactttatctatgatgaagatgatgattgcagccgttgggaacgtgtagagttctatgatcccaaagatccgtttaaggtaggatggaataagggtggtattgacaacaacaaacagagtgatgctgccggtgaccgcggtgagtgggacatggataattcgggtaatgctcaactctatatcagtcgttttgacggtcgcctgcacctatatggggcagaaaccggagtttggcgtattgatcagaatgcggaatacttccagggatgggaccgtatgtggatgggcttccgcgatccgaaacagtttgctacagtactttatagcgatcgtgacaataatggtttcttcgatcatattgaatatgacctcgatggtgatacaaagatggagaccgtgattgactttaaagaactgggtattgacgatgcctgtgaggtgattgatatttccaagtttacttataatgattatgttgctttaggcaaacggatgtctgaagatatctggaagaatgccgggcaagccgttcaggtggcacgccaatatggagtagaacctttgtggtatgctaaatggatgcaagcttcaaccacacgcgagaaatataaccgtggttactggttgcaattctacttatacaaagatctggagaatctgtttatccgtcagggcgatgctgccaagctccgtttgttgaatcaagcttattattccggcaattggtcaattatagctaagaaaggcaacgaaggtttttatttcttctctgatgaagatgttgctgctattcgctcatcggcaaaatcacagtggggaaagaaaatcatagccgatttggaacagaaagtgaaagaaagacgtaagcatccgttggaagtgcctaaagaagaaggaggacattttcatgattacttctgtccggtacataatctgcaatttactttccgttgggataagcctttggcacaatattgctcggcttgcgataaagagtggattggaaacaatcgttatgactgggcgtggatttatgaagtacacatgctgaacagagattacatgtatcagtgtatgtacctttatctggccaccggaaaacaacaatatgctgattatatccgtaccatgttattggattatgcaggtaagtatgccggttggttcgagcataactcaggcaggaaagctactgatcaacatagtgggaaagcatttgctcagagtctggatgaggctaactgggctactaaagtggcaatggcctatatggctgttaaaccagttttatcaaatgaggaggtcaaagcgatagaagaaggatatctgcaacctgccgctactttattgttgcatcgtccagccggggctaactggcagatgtggcataatagtggattggctgccttaggcattgctttggaaaatgactctattgttaatgtagcaatcaataaggataagtatggctaccactacctgattgaaaaacataaaaataacgatggctggataaatgaggggtctccccattatcattattatccgttggaagccttgctgttcactgctaatgcagtaaaatgccgggggataaaactgtttgataaggatttgcacgatatgtttgtggaaccggtaaagggtacatatccagatttatctttccctgcacatagcgatggatggtatggggctaatcttctgtctcaatcagccttgtatgaggtagcaaatgcccggtataacgatcctttcctgaagcgtgtactggaactgacttatgctcagaaaaagagactggattccgaagctttgctaagtaaccagttgataaaagcatccggggagagtctgttacagcagagttattcgtttgatacttccggtttctgcttgttacgtagtgatgcacgcaccgttgtattgaaatttggtggagaaggtatcggacacggtcatccggataaactttccattacgattcatgatggtaagaatgagctggtatctgacttcggaacttccggttatggagttccggattatttgaaatggtataagcgtactctttcgcacaatacggtgactgtggatgctaaggatcagaaaaggagtgtgggtaaacttttgaagttcaatccccgttctgacggaggatatgctgaggcagaaaccactacggcttatcccggagtcaggatgaaacggagcctggacttaaaaggtacacatttgcaagatgtatatacttgtacatccgattcttctcatttatacgaatatgtcatcctgttcaatgagaaaccgattatggatggacagccgacagcaactacattgacaggcagcgaagtacacgaacggattcataatactttctcctatcctcataaatcaggttttacttgccgtacttcttctgcttccgtacaattcggtattcctgagggagaagtggtggaagtggtattgggcgaggcttcgggaataccggccaatccaactgttaaagatggaccgggtgcgggagatgtagcagtaaagccttgttatccactgattatccgtatgaaagggaaggctatgaaggttgaagctaattggaatcttacacgtatcaagtaacgactgattgttaacatataaatatttgcttttataacaaaaacataaacatataattttatgaagaataaactctgcatgctgttgttggcctcaggaatcggattgttttcctgtgcagaacaggacctccccaaggagtataccgatagcgtgaatgtatttatagggactggtggacatggccacactttccctggtgcaactttaccccatggaatggtacagttgagtccggatacccgtctctttggctgggatgcctgttccggctattattacgacgatacttccatcatgggctttacccatacccatcttagtggaacgggtattggagattatggcgatatactctttatgcccgtagtcggcgagaaacctttgattgccgggacagcagaaaacccggatgaaggctatcgttctcgtttctcgcatgaacaagagagtgcccggccgggatattatcaagtactgttgcaggatgattctatcaatgtggaactgaccgctactttgcgtgcaggcctgcatcggtatacttaccctaaggcaagtgatgcccgtctgattgtggatatggaacctaccattcatggtcatcagcatcctgttactcagattcgtgtggtgaatgattctaccatagcaggaatgaaatatactgttggttgggctaagcgtcactatgtatatttctatgcagtgttttccagtccgtttgattataaattgtattcgggaactgagtatcaatcggatagtacatctgtaacagtcaataccgctaaggcagtgattagttttagaaatctccctgctgacggacgtgtattggcaaaggtaggtatctcaagtgtggacgaagagggtgcccgattgaatgtagaggccgaaatccccaattgggactttgaaggtgtcatgaaacaggcgaatactgcctggaatgaagcccttggaaagattgatatcgaaacttcggacaatgatagccgtactgtattttatacttcactgtatcacgcatttatccagccgagcctggcatccgatgtggacgggcgttaccgtacaatgggacatgagattaagcaggatgcttcttatacaaattatacagtgttctctctctgggatactttccgtgcagctcatcctctctataccatcgttacatcagagcagaatcaggctttcattcgttcactgcttcgtaagtatgatgaaggtggcatcttgcctaaatgggaactggcttctaatgaaaccggtactatgatcggttaccacgccgtttctgtcatagccgacgctatgatgaagaaacaatgcgattttgatgtaaagaaggcactggaagcatgcatacgttcatcggtatatgatactacgggtgttacgccgatgatggatcgccagattctgaatgggaaactgatgcctgtatccattaaatataagaatgaactgggatatattccttgcgataaggtaggtggttctgtttcacaaggactggaatttgcttataatgactggctgatagcccagatgatgaaggagcataatcgtaaagacctttatgataaatatatggagctttccaggaactatcggaactactttgatccggaaactaaactgatgcggggacgtctgagcgatggcagttggattactccttttgatccggcatccgtgcaacgtcctagtaattacgtagagggaaatgcatggcaatgggcatggtttgtgccgcaggacgtagaaggactgatggaactggttggaggacagaaatctttcgaggcccatctggatacgctgtttactacaagttccgaactgacgggtgatccgaacgccgctgccgatgttaccggaatggttggccagtatgcacatggcaatgagccaagtcatcatattccatacctttataattatgccggtgcacctcgcaagacacaggctttagtagaccatattcttcgtacactctaccataatgatcctaacgggctttccggaaacgaggatgttggacaaatgtctgcttggtatgcgttgagtgctatgggattctattcgttctgtccgggccgtccggtttatgaaattggccgtccgatattcgataaagtgactattcatttgagtaatgggaaagattttgtaatccaagcgaagaataatagtgtggaaaataagtatattcgctccatgaagttgaatggtgaggatttggcggaaccgagattctctcatttcgacttgatgaagggtggagaactaatatttgaaatggaaaactaaaaagatgctatgaaaagaagaatcgctttatgtattgctgtatcgctttgtgcgggtgtgtatgcgggtaataatcccggtatatataagaaaggctggattgattttaacaagaacggtgtgaaggatatctacgaagatccttcggcaccgatagaggcaagagtacaagacctgctgtcgcagatgaccgtggaggagaaaacttgccagatggctaccttgtacgggtccggccgtgtactgaaagattctcttcctactgagaagtggaaagatgaaatctggaaggacggtatagccaatatagatgaacaagccaatggcttgggacgtttcggttcttctttatcatacccttatgtgaatagtgtagaaaatcggcagaccattcagcgatggtttgtggagcagacccgtctgggaatacctgtcgatttcaccaacgaaggtattcgaggactttgccatgaccgggccaccatgttccctgcccaatgcggacagggggctacctggaataaggaactgatcagtgaaatagctcaggttaccgctgaagaggcaaaagcattaggttatactaatatttattctcctattctggatattgcacaagatccgcgttggggacgtgtagtagaatgttatggagaagatccttttctggtgggagagcttggaaaacggatgattaaaggacttcagcaagaagggctggttgccactcccaaacactttgcagtatatagtatccctgttggtgggcgtgatgccggtacccgtaccgatccacacgtagcaccgcgcgagatgcggactctttatatcgaacctttccgcaaggctttctgcgaagccggagcattgggagtcatgagttcatataatgactatgatggtgaaccgattaccggaagctatcatttccttactgaaatacttcgccacgaatggggctttaaaggctatgtagtgtctgacagtgaagcggtagaatttctttattccaagcatcaggtggctgccgatgctgtagatggagctgcccaggtagtaaatgcgggactgaatgtgcgtactaactttactttgcccgagaacttcattcgtccgcttcggcaggctattagtgaaggaaaggtttctatgcagacgattgatagccgtgtagcagatgtgttgcgggtaaagtttgggatggggttgtttgataatccttataagggagatgccaaacatcctgaaaaggtggtacatagcaaggaacatcaggcagtatccatgagagcggctttagaatctatcgttttattgaagaatgagaataatatcctgccactctccaaagatttgaagaaagtagcagtgattggtcctaatgcgaatgaagtgcagaacctgatttgtcgttatggtccggctaatgctccgataaagacggtatatcagggaataaaagagtatttgcctgatgcagaggttcgctatgcaaaaggaacagacattattgataaatattttccggagagcgagctttacgaagtaccattggatcaggaagaacaggctatgatggatgaagctgtagccttggcaaaggaatcggacgtagccatcatggtactgggaggaaatgagaagacagtgcgtgaggaatattcccgtaccaatctggatttgtgcggacgacaggaaaaactgttgcaagctgtatacgcaacgggcaaacctgtgatcttgttactggtagacggacgtgccgccaccatcaactgggctgagcgttatattccgggtatcgtacatgcttggttcccgggagaatttatgggagatgctgtggcacaagtacttttcggtgattataatccgggtggtaaattggcggtaacctttccccgttcggtagggcagataccttttgcttttccttttaaaccgggttccgattcaaaaggttttgtacgtgttaccggtacgctttatcctttcggatatggtttgagttatactacttttgcttatagtgatttaaagatagagaatccggtcattggtgtacaaggtagtgtgaagctgagttgtaaagtgaagaatacaggaaaagtagccggagatgaagtcgttcagctttatctgcatgacgagatgagttctgtgactacatatgtaaaagtattgcgtggcttcgaacgtatccatctggaaccgggcgaagaaaaagtgattgatttcgtgcttaccccgcaagagttgggattatggaataaggataatcatttcgtagtagaaccgggcacgtttgcggtaatggtgggaagttcttcacaagatataaagttacaaggaaaatttgaagtgaaataattactatctttgctatgcgatatgaaccatagtctttaatcatcatgaaatggcaactttgtaaatagcttcgtttagtatgatagggcaacagctaagtctgttgcccaacttgattgtgaccgtttccgtcacaagatattaaaatactaaacatacaaaaagaagtaattacaatgaatacgaaaacatatccgcgtaccaacgattatcagactatttatctgaataccattatcaacaatccgaatatcatagttggtgattataccatatacaatgactttgtaaatgacccggctcaatttgagaagaataatatcctctatcattatcctatcaaccaagaccgcctgataatcggcaaattctgttctattgcctgtggggcaaagtttctttttaacagtgctaaccatacattgaaatccttgtccaactacacattccccttgttctttgaagaatggggattgaataagaaaaatgtaacttcagcatgggataataaaggcgatatcattataggcaatgatgtctggataggttatgaagccgttattatggcaggcgtgcatataggagatggagctgtcatcgcagcccgggcagtagtaactaaagatgttcctccctacaccatagtgggaggaacacctgccaggaaaatacggatgcgatttgaggcagagacaatcgccaagctgcaacagatacaatggtggaactggcctgttgagaagatacgtcagtccttaccttatatcatgaatggaacggttgacagacttacttaattcctctctttgtattagaatcatatccccatttttcactttatgcttctgaggtggtttgtttcctgaaatcgtaatgataccatcttcgaacatacgtttcacctgattggcagagagtgagaagcgccttctgattaatgatgataatttgagatcaaactcaaactcgcacttgatgtggattttgataacctcattgggtagattcagcaaatcttccaatgaggtattaggaatgacttcgtattctacactaccataatccagcctcaggttattctttctctccatttcagtagaaaaagcatacttccaggctgtgtctttatcattcattgaaaaattatggaataatgtcttgtcaatcaaatccggtttactgcgtgataacaaagtgaggttgcaggtgttgttacacttcacgcatctgtaaatcaaccatacatctatgttcttcttttgagcattcatcctgaacttgtcgctacaataaaatcggtcactatcgcagtgactgcatttcttaattaataaaggggtattcttcacctttacttcccatgtaattgttgtctccataaataaactattatctttctttgcgggttaagtaattttccggcaaagttggatattagccatttgtataattcacaagatgtcacaagacgctatgaaaaattctttgtttacctgtcaagttcatccatcattagggttattttctctttcagtttatccagaaattgtgtcctgcttttcttcctgttcctgatttcaagaaatatccggtagaaatcaccaatctcaatatcaaaaagagtttcgcagcagaaagcgatttctttcaggttcgtgttaccattgttaaagcattttccagcatatagtgcataaatgaattctaccaatgaaaccttactttccgtccattgcaatagtttgctttctatgatagaggtgaactttaggtgtagtttctccgataacgcatcaatctccgtggagagataatgagtgagttgcttatttgctaagatctctgctacgctggaatcatgcaaagtggaaaaagaagtatctctgtccaacgagtggcagtgaacatctgaaaggatatcataatgctttctcatgaaatacagatgatctgagtctgttttaccggcttgataatagttatagaaattcttgtccgaagagatattcttcagactttcatattcctccttcaggtatttatattgagctgacggtgatttcccgatccgattcctttcaatctgatacagacggatataaaatatcagtagaccggatatttgtggttttcggactttaaagaaaagaatctcctcctcgggattaataaactgatagtccgcaatggttgcttttagccgggcgagtgaagtctgtatgaagccgactatttgctttatcttatcaaggatatcaatatcttgttgctcaattctttggatttctacttctatgtcttgcttaatgttctttacgaaattctccattcgcattcagcgcatccataactttcaggcggttgctgcgaaacctgctaaaagtctgaatagcaaattacaattgccttgcagagacaatgtagttaatactaaaaatgataaaatgaaaaacctgtctgaataagaattattcaaacgaaagaaattagcctgtggtttgtgaggctaatattaagcaataacaaatttaagaattgtgcccaaaatagttgcttttagaatttggggcaaatatagtcctttttttgtaaatcccctaaatctacagtcaaaatgtagattcagaggatattgagtataaagagtattgaattgaactatcagaatatatattgtacaccaaactggtatccgatatacagttgttgcagtttggtagactcagtctttttccataaggaatggttcgggaatattttgctgttgctcacatctttggtcatcatatagtttatgcctacccctccgaacagctcaatatgcttcccgattctgaaggacggaatgagtgagtatccagtattcaaaacaggttcatccgaatcgtttccgatggttgaggctttaagttcattgttaatcctgaaccaggaggtaacgggaatatgagcaccgaatccaccttcagccaccaatgagttattctcagttttatggttatatccaacgcctataatgccataagtgtatctgccgcccgaacggaatgtggctaccgtacttcccaatgcatcataagtgacggcaacccccatctcaccatttttaatgatgttgattaatccgatggggcagtcactcttatccgctatattgaccagtccggcaaattgtacgccattgacctcttttgcaatgttgactaatccggcaacctgcaaaccgtttacttctttggcaatattgactaatccggcgaattggaacccggtcatttcagaagctgtatttgccaaccctgccatctggaaaccactgaacttatgcttatttatattagccagtcctgcagactgcactccctgtccgtcatttcctacatagtttgaaagtcctgccatttggaaacctttggcatcattcagaataatgtttgagatacctccccaggtgaatgcctcttcgtttctggaaatgcctacaagtaagttgagtgaaacagtattcgcatactgatgcgaataggctccattggtactcaggggcgggacaaagctcaattgaaatacggttttcttgtcttcattggattgagcaaacaatgcgctataaactaatacacatagtattaaaactaaaatcttcttcatcattttggttttctttgttattaatctttatatttctatcatcttgatttcggttacaaaggtaagtttaataattcttccttagagagtttgtagacgaaccatactgtttcttatgacgaaatgatgaatatgagtgattattcccgtaatttctttggtgtgataaaccaatcctcaacatgcgataaactaactcccagaatgcaagaatctattctcgaagattcataaaactattcatactataactgttattgaatcttacaacaactgtgttactttcttacaatagatataattctatcttacaacaactgttgtaagaataaaaatgtgcattctgagaattagtttcttgcattgtggcgattacttccttgcatcgttgctattctttttgttggcaccgaaatttgctattcgcgttctatatcttgcatcctgaaatttgcttgggtataaattagtatctttgttattcattttaaccacgacatttcagatggatggcaatttttatatatataccgatctctctgcccttcctgtagatgaacatgaagcgtatttggcagaagggtttggtggagtttgcacaggtggaacggctgtaatagaggttttttcagtcagccgccagatatctaaaaacgacctggtgacagttttgccgttacagtcagtattaatccgtgaggtaagtcccgatttctctatgacttttttcaaaatagataaaacgatgttcttggataccatgagtagcctggggaagattactcctgattttttcttttatatgcggaagaatttccaggttcggttgactcggggtgaagttcagagatttcttggcttctgtcgtgcaattgattttcggaacagttctgacgatcccgctttccggcgggaaaccatattgcacttgttgcgtatcttttattgggatttctacgttcatttccgcaagaccgtaagccgggagggagtttctatccccttgaactctaataaggagaatattgctttccggtttgcaatgctggtctatgaacactataagcaacataaagaaatggcgttttatgcggacaagctgtgcataactcctcaatatctgacccgagttattcaggaggtaaatggtcagtcggcccgcgagttacttgcagatcatgttgtactggaggtgaaggcactgcttcgagacgctaatcttgacataaaagatattgtgcggcagacgggtttttcaaaccagtcgtcgctaagtcgcttttttcgccggcatacgggtatgtctccgacagaataccggcgtacaattcacattattcgctaactacaaaaactgataaatggaacgactggaaacacaaacttgcaatggagatagtacatcttttgaaaaagagatgctggcattgttagatgagcagattttcttgacagatagcgtgttcgcccgtctgccgatgggtgtggaaatttacgatgcgtcaggcatactccgttgcttaaacgaacgggcacgacttatgtatggtgttaagctcgatgcggtaataaacaaagtcaatctgtttaaaagtccttatgtggacgaggcgcttttagcgagaattcaatccggagacgacattgtgcttgaatttgagtatgatttcgaccggatgaataaagagtatttccatacttccaataagaataccattatctacgaggtcaagattgttccgataaccaataagcaggggactatcgtaggccatatattgctcaccaatgatgtgacttctaccaaagaggcggagtatcggactgaagaaagtaagaaaaacctggagatggcgatggaggctacgaatatgtcttcatgggtatacgacgtgtacaaaatggagttcgggatattgcatggaaattctgtattcaaaagtggtatgtccttggagcaattgttaccgatgcttcatccgcaggactgcgctccgttaagggaactcttttcccggctgataaacaaagaagtcctgcaggggcagctcacagtacgtgttttcaatgaccaggaaggaggattccggcattatgagagccgtatgcggctttcgaccgagcattttggtaaattgcagattgtaggtaccttgctggatgtaactgaaaagctccggatggcaaaaaagacacaggatcttttagttaagcgtgaactggccatgaaggtcaacgatatagttcactgggattttaatgtgcagatgcaaacattcgaagcttacaatgatccggtaaacgattatgcttctgacaagttggtatctttggaagagtacttgaatgtgattcatcccgaagacaggtctttggtcaatgatgctctgcaatctatgctgttggggcggaatatgaatataaatctcacctgccgtattcagaccaggcatgatgatacatggcagtactgcaatattgcgggcgttccttttgaattcggagaggctggagaggttatccgttataccggctttagacagaatatttccaaactccatcagttgaacgaggagcttaaagaacggaactacaagatggaactgactttcaaaactgtgggtatgtcctattgggattacgatgtgaagacccggcaatatcggtcattcaatgatccggtgaatgattttaatcccgaaaaagcaattatgcccgaggattatttgaaagctgcccatcctgaggatacggaacgtgttcgtgaaaatatggtcggcatgtctgccgggcagtataaggagttctcgcttcagtatcgttcccgtaccaaatgggatcaggattggcagacactgattgttaccgggcttccgtctgaacgtgacaagaagggaaacgtcattcgctataccggtatcgctttcaacaatacgaagtgggaaaaaatggctcaggaactgaaagagatgaaggataaggccgagctctccgaccggttgaagtcggcatttctggccaatatgagtcatgaaatacgtacaccactgaatgccattgtagggttctccgaattgctggtcgacagtgacgacccggatgaaaagaaggagtattggcatatcatcgagtccaacaatgacttgttgttgcgacttatcaatgacattctggatctttcgaagattgagtcgggaattattgaccggaagcgggaacggttcaacttgactaaactgtgcaatgaactctatgtgatgatgcggtcgaagattccgaatgctgacgtggagttggttcaggataatccttgtccggaatgttggattttcctcgacagtaaccggcttaagcaggtatggatgaacttcctgactaatgcggtaaaatataccagatcgggatatatcagaatgggatactcggttgaaaaagacggaattcggttttatgtggaggatacggggacgggtatccctaaagaactacaggatcgggttttcggtcgtttccagaagttgaatgaatttgttcaaggtacaggacttggattggcaatctcccgggcaattgttgaagctgcgggtggagagatcggattcacttctgaacaggggattggatcgaccttttgggcatgggttccgtgtgagatttttcagcatggagacgtcggttgcccggaaacaactcttccaaaccatcgtccggtgtttagcgaaggcagtgacaggaaactcaaaattctggtggctgaagataacgacagcaatttcttgttagtgcggaatattcttaaggattacgacttgttacgggtgaccaatggtgtagaggctgttgaggagattcgcaatgggaagtttgatttcgtacttatggatttgaaaatgcctgtcatggacggtttagtagctactcggaagattcgggagttcaatagtgacatcccgattgtagcacttacagcgaatgctttcgatactgaccgtgccagtgctatggatgccggatgtaatgctttcttgcctaagccggtaaaacggaagcaactgtttgaactcctttcaggggtctgtcggtaagtttgagataaatagtaactcgtttgtttagtgtgcttcggtagcagctcttggaataacttctaccttattctaactctgttgcgcagatatcgattgtactcagtgcgtccgagatatcagtcggggttatcccttgacattcaattctcagtattttctcccaatcttcaaagtctacgttccatacgtggatctgcggatattgggtgaataacttttctattttctttatttcctgcttcttttctatagaagtccggaagattaaaatattgtctgtcattgcgataacttatttaataccacttatgttatttagtctgtttagtctttctggaagcacttcgtttgatgcaaagataagccgaataatctttccgtaaaaagtttgtagaccaacctacagattccttatgacgaaattaagaatatgagtgaccaacttcttttcctgtatattcataccgcttcattgggtttgcaaaaatagcgtttggattttgcatacgcttgtaaaaaaacgccattttgctatacggttctgaaacgttgtctgtaatctgatggagtaattcaatcagtgctaatgtagattgtctcttaatccatgatagtgttttggcatcgaccatatccgtgaggctttcgggaatacccggaatgaatagggtatctatttcataatccagagatttttattattggaaaaactgacttcctatcatgaaatgtgcttagtgaaagaggcgatggctttttgaagaatagacgtttttcttccaaatgtacttttatgcttgcataatttatatatttgcagcataaaaatcttgtattatgttaagaaaagcaccttttttctcatatgttgtaagaatggtaacattctttggttttcttgggctatctctttatatgaatgcccggaatatacagattaaggatattccccatatagataaattgtccacgaatgccatcaataccatttttcaggattctgaagggtatatatggtatggtacagcggaaggattatgtcgtgatgatggttataatatccatacattcaggtctgactttaaagatccggatatgatgccaagtaatgtgatcacttgtctgggagaagacagtatcacacacaatatctggattggaactgataaggggttatatatcttaaataaacaaacttacactattgcatctgcggatatcgcagagcttaaggatatcaatatagagggaatcatagtgacctcagatcactctatatggataaatgtctatagaagaatgttccgactttcgccagaaggagagattcagaaaatgtacccattgcaatgttctaccggtccgggagaggagtatgtactgtatgaagatagaaaacatcaactgttgctctctatatctggtaaaggattacataaatggaataagcaaaaggatgaatttgaactattcttcccttatactgataggataagtgatcttatacaagatagagagaaagactattattggctggcttcctggcaacaggggattattcgtttggatcccttgaattctgttaaggaattgcaatatgttcctcaaccattacctatgaattctgccgggcaaatagccaagacggctttacatcttgtgcaagatgatgtgaacaactatatttgggcaatatcatggagtgacttgtttgcctatcaggtcacaacgggtggactgttgaagcaggtagatacctcaacgtttttgccgcaatacaacaaagcattaaagcgtattattaaagatagggatggcaatctttgggtgacttctctggataatcacaactttatcatctattttgatgaggataatttgcatgaatacaatatcgccccattggaaaaacaaataaagtggacaccaatttttgaaaatctgtgtaaggatgagaaaggaatattttgggttttccaaaggcgtctcggactttgtatttatcaaccggagaaagataaaatcgaatgttataccagttcgaaagcagtcagtgacagtccatttctggtactttcttatttgctgaaatcaaaaaaacaagggctggtatggatagtaccgcaaagtagctgtgaattatatggcttgagccagaataatatggagatagaaatagaacgtagggtgaatttgttttcggtatcaaagacctatgatgttatcaattatttatttgaagataatgacggtaacctttggattgcagcaggtaatcatttgtttatctaccagatagaaagtgagaagttggagcttgcttctgataatataggtgttatcaaaggtttggctcaaacagaggatggtattatctggggtattgtaaaaaataaaggtctcatcaggattgacagggaaaggcatatgacagaatattctgccccttattcttttctatgtgtagctgcagatcataataaattatggctggggactgataaaggaggtattatgttatttgattctgaaaccggctcttttgaagattataatacggcatgtggagtaaacggagacaaaattagcaatatcatagtggatcgttttcatcatgtatggataacaaccagtagggaggtcaaggaatttaatcctaagaatggagcctacagaagtttctatgcatccagtaaaaatattggtttcaaccgttttcttccccagtctgtgtttgaagatgctgacgggcaactttactttggtggtattcctggtatattatctatttctccttctcaacgtctggacaatatttcccaacccaaagatattcttataactgatatacggattatgggacggagtattctactggataataaacggccgggtaaatcattgaaagttgttgatatatatccggaagaacaaaatattgagatacagttttcatctttagactatcagaatagttcgcggatacgatatgcatatcgcttatccggaatagataaagagtggatatatttgtcggcaggaaaaaactcagctttctataataagttgagtaaaggtaaatatgtgtttcaggtaaaggctacagatggaaatggtttgtggagtgaccatgtggttgagatcagccttaaccgccttccggcctggtatgaaagttggtatgcttatacggtatacgtattgtgcatactggcgattacctactatttctatagaatggtacgtaatcgcattcgtatgagacaagccatagcaatggggaaaattgagcgccagaagatagaagaaatcaatcacgccaaactgcaattctttactaatatcacacatgaactactcactcctttatctataatttcagcctctgtggatgaactaaaggaagaaataccaagtagttcgcggcttcttcaggttatggagaacaacacttcccgcttaatctgactgatccagcagattcttgaattcagaaaggtagaaaacggaaagttgaagttgaaagtttcttgtggtaatatcagcttattcctgaaaaactccgttttggcttttgctcctttggtaaagaagaaaaaattatctatttctttggaggcgaccgaagagtgttctggatatttcgatgtagataagttggataagattatatataacctgctttctaatgctgctaaatatactcctgaaggaggtgccataaccctatgtcagtcttatgatgaagaaaccggattactgaaaatcactgtcaacaatccgggagaatgtattccggaagaaaaactggcgcatttgttcgaacggttctatgaaggtgaatatcggaagttccatactattggtaccggcatcggcctttcattgacaaaagatctggtggcattgcatcatggcactatccatgcctttagcaataaagaggaaggcaatacatttgtggtacaaatacctgtgcggcgggaggcattcaaagaagaggaaattgatgaaagtatggagtatgcagcttataatgttctgcctattggtgaagtagaagaagcagttgctacggatatggctgaaagagaaccgggtagttcctctttattgctggtagaagataatgaggatcttttgtcgtctatggtccgtttgttgcagggcagatatcatatcttacaggcaagaaacggggtagaggcattggctgtgcttgaaaaagaagaagtgaatctgattgtttcggatatcatgatgcctgaaatggatggaatagaattatgtcgcaggattaaagagaaatttgaaacttgccatattccagtcatcttgttgacggccaagataactgatgaggatcaggtaatggggtatgaatcgggggcagacggttatatctgcaaaccactccgcttgtctgttttattagccaagatagacaatttgttgaagaagagtaaccgtatgggaatagattttcgtaagcaattagtgttcgaagctaaagagttgaattttacttctatggatgaggcttttatccaaaaagcagtggattgtgtgaatgcacatttggatgattgtaattttgaacatgcacaattcttggcagagatgggaatggcgagaactactctggctgataagttgaagttattgacggggcttactccttctggatttatcaataatgttcgtctgcaagctgcatgtcgtttgatagatgaaaagaagaaaatccgtatttcagatctggcttatgcagtgggattcaatgatcctaaatatttcagtctttgtttcaggaagaagttcggactgtctcctacagaatacatgatgaagtatgagaattgaatttattagcgagaaagtacctttttgaaccatcagtctctcttttccggtaatagttctccttctttttatttatattcctctacttttgaggacgtgaattaattctaaatataaatatgaatttaaagaaggaaactatgattaaactaaaaatggcaacattgctgcttgtctttgcatgcacctttttctgtgtttgtgatagcagtgccaagactggaaaaaattattatgtagatgccttgcaaggtaacgacgatgctaatggattgagtaaacaaacagcttggaaaagtctggagaggttgaaagatattcagcttcgtgcaggagattcgttactatttcgaagagggtctgtttttatcggcattttggaactctcagcgaaggggaaggctgagaaacgggttattatagatgcttacggtatcggtagaaaaccatgtatcaaagcaccggacgcttcactatatacaatattagtacggaactcggactaccttacactacagaaccttgaagtggtaaatactggtacagaacggctagcacaccgtacgggtgtaaaagtgctgtgtgagaattacggtgtatctcataacatcatactcaatgcattggaaatccatgatgtaaatggtagcttaatcaagcagaaaggaggtggttctggcattttaattgtgaataaagggcaagatgtaatatcgacctttgatggattgaccattgagaattgcatcattcgccgttgtgagaggaatggcatgatttggtcttcctatagcagccgtaataattggcatcccagtaccaatactgttgttcgtaaaaacctgatagaagaagttcccggtgacggtattgttccgataggctgtgaaggagcactgatagaatataacttgatgcgtaattgtccgggaacactaccgcatagcgaagctgctgccggtttctggccatggagttgcgacaacactgttcttcagtttaatgaagtgagtgaccataaagccccttgggatgcacaaggctttgattccgattataattgccataatacgaccattcaatataattttagtcatgataatgatggggggatggttttaatttgtaattccgggacagacggtggagtaggcaatcagggtacggtagtacagtacaatgtgagcattaatgatgctattcgtccacgtgccacacgcagtggtatattttctgctactattcatatcggtggaccttgtgagaatacgctgataaacaataatatcctgcatgttaatcctaagacggcttcgttcatagaccgtagtatcattacatctgattcatgggatggatatgctaataacactatatttaaagaaaatatcttttttgctcctcaggaatcggagattcgtcttaccaaatccacaaataacatctttgatggcaattactatctaggaaatttcataggaaaacctgccgataaaagtgccaaggatgcttccgcttattactattcatgtataagtaaagacccaatgggatttgatagtttgtctttccttttcgatatggtaattgttggggatggggctgctgtactgaaggtagtcagtaaggatgccattcatcgattctttgaagatatgaagaattgattttttatctgaaacaaaatatagcgatagtattaccggataataacggtagtgctatcgctatattattattccgcaccgtctgaaggtagagggggctttaccgaatttctttttgaaacattggctgaaatatctcggatcgttaaagccaaccttataagctacttctgatatattgtattgcctttccgacaataggctgcatgctttcttcatgcggacattacaaataaattcactgggtgacaatccggtcaatgctttcactcttcgatagagcatggatctggatatatggatttctgcttgcaggagtggcatggataaatccggattatccatatgtttctcgatagcagcaagtatttgtttaaggaatgcttgctcggatggattgggcgcaattcttggatacttcgattggttctgcatttgtgcagacaatgcatttgtttttgatagcaattgggtaatatagcctgtaatatcttcgtaaagagtcgaaggaagtattatgacttccagtttttctgtaaccggattcatgaatggattgtcaataaggtatgctctcatatgtttttagaattaatgaaataatatatggagcaaacttccgaaaaagtgagtaataggagggtgaattattaccggaaacctgcttataaggcgtttataaccctttcccggtaatgattcatcctcttattccttatatccacctacttttggctaacgatttagaacaaagaacatatatgcatcttgttgaattagtcaccttaattatctaataaattttaaaagacgatgaaaaagaattcgtttagattcaaaagaaatcgaaaggcgataacagccttgctaatctgtgtaggtttcgtcggtattcatcctttggcggtatttgccgaagatgatgttaatgtcgtacagacagtgcaacaacagaaacagaccattactggtattgtgaaagacgcaacgggggaacctgtgattggagccagcgtgaaagaaaaaggagatccatccaatggtgtgataaccgatattgatggaaacttcagattgagtgttcctgctaatgcaactattgaaatctcatttatcggttatcagacggccagtgtgaaagccatttcaggaaaacctttaaatatagtattgcaggagaatactgagatgttggacgaagtggttgtagtgggttatggtacgatgcgtaaaaaggatttgacaggttctgtcattcagattcgtccggacaatcttgctaacgaggcacccaagacagtacaggatgtactacgtggtacaccgggtttgaatgtgggtatggatgcttctgcgaaaggtggtggttctcttcaaattcgtggtcaacgttcactttatacagacggtgggcataatgatccgctgattattcttgatggcatgatgttttatggagaactttccgaactcaatccggatgacattgcgcaaattgatgtattgaaagatgcttctgccgctgctgtgtatggggcaaaagctgctaatggtgttattattgtttctaccaagaaaggaaaaaatggtaaaccgatgattaattttagtaccaactggagcttttctacaatgggagctaaccgtgatgtttatgatggggaaggttatttgaagtatcgccgcgattggtatgttgcaggtacatacggtgtaaaccctgaaactggtgcttatgaagagtatcaggcggataagaaaaaataccctgcaggatattatgatgctcccacacaggaaaatctgaataaatacggtattacccttgaccaatggcgtgcatataccaatgcgggttcggacatttccgaccaagaagtatggggagccactaggcttggtttacagggaaatagccttgccaattttctcttgggacaaacttttgattggtacgatcattcttttcgtacaggtctcaaccagaattacaacgtgagcatgtctggcgctaccgatcgtgtgaattactatttctctctgggatatatggataatgaaggagtggcagtaggtaatgattataccactttccgttctaacatgaaagtgaatgcaaaagttaccaactggtttgaagtaggcgctaatgtcaacttccaagagcgtaccgatggggatactacggtagactggggcaagcagatcactgaaaacagcccatttgcttcttatcggaatgaaaatggagaattggagcgctttccgatgggaaatgtttcaggaaatacggggtacaactatgattacagacaacaatttaaggaacgtgagtcgggttatacagtacttaatactattttgaatgccaaattgacgttaccgttcggcatcacttatgccttcaatatagcaccgcgttaccagtggtactattaccgttcttttcagtcttcaaaagatcctgatgtaacggcagggtcggcaagccgtaacaatggtaagcgttttgactggtcactgaacaacactttgacttgggataaaacttttcttgagaagcaccattttacagtgacactagtacaggaagctgaagaacgacgttcatggggtgacaatttgagtgccaacaacttacaaccgactgatgccttgggcttccattatgtaaaagcaggtgacaaagaatccagtgctttcagttcggatgatggacatgaaaccgctgacggtatgcttgcacgcctgttctactcgtatgatgaccgatatatgtttaccggctctatacgccgcgacggttattcagcttttggtacttccaatccgcgtgcaactttctattcaaccgccttcggatggactttcacaaatgagaaatttttcaattgggaaccgatgagtttcggtaagctgagattttcttggggacagaatggtaaccgttcattggctaatccctatattgctcttgccgacctgggctcaggtaccggaggtacttatggttatgtagacgcaagtggtaatacgacagaatatcgttactttacaatgaaccgtctggccaatacgcatctgcaatgggaaaagaccactgcctggaacattggtttagattttggctttctgaataaccgtatcagtggtagtgttgagtattatcacatgcctactacacagatgattatgaatcagtccttacccggattttccggttttggttcagtcactaccaacttgggagaggtgcagaaccgtggtgtggaaatctcattaagtacaacaaatattaaaaatgatgtgctggaatggaatactacgataggcttttcattcaataagaatgaaatcaagcatctgtattatgagtatgaaaatgtgcttaatgctcaaggtgaagtaataggtactaaagaaagagatgatatttccaataaatggtttatcggacagcctattggggctatctgggattataaagtaaccggtatctggcagaaagatgaagtggaagaagctgccaagtatggacagcgtccgggtgaccctaaggtatggaacaatcctgataatgataaagtaaatgcagacggtagtgttactatcgtgtatgacaatgatgacaagcaattcctgggacaaagcagtccgaaagtgaattggtctatgcgtaatgaatttactttcttcaaagatctaactttctcattcaatatttattcaaagatggggcataagagtctagaaacagattacctgaataaagataatgcaggctcaaaagtgacgaatggtcagaatgtatatgctaagaagggatattggactgtagataatccgaccaatgaatatggacgcttagatgcacaaggtccgtcgggagtgactacaccgggcaaattacataaccgttcattcattcgtctggataacatttcacttgcctataaactgcccaagaagttcatttcacgctggagtatagaaaaggcgattattagcggaagcatcaagaatgttgcagtctgggctaaagactggaaatactgggaccctgaaaccggtggtttggctccgagaacctttaatattggattaactttaactctttaattacataacggatatgaaaaagataaaaaatatagcattgataggtatgattgctgccggtgcgttgtgttcttcttgttcagaagacttcctaaaaccggacccgctttcattctatgaacctgaacaaacctttactactgaagccggattgcgctctgttgtagctacgctggatagacacttgcgcaattactggacctattatcaagctgccaatctggtaactcctttctatacattgtttatgcataccgatttagctgttgccggaaaaacagatcagagtactatctgggcagatccatccgaacgcctgactccttcggacggaatgggcggcggaggtagcgaagtgaatcagttctcgtatttctggggtgaaacttatacaggtataaaatcagctaatacaataaccagctatatcggcaaaattaaggatatggacgaagcttccagaaataaatacattggttgggcttattttcatcgggcatatcgttatttgtcattggtctttatgtttaaggatgtcccattggtgacaaagattatagaaggtccgaagttcgactataaaacaacttcccgtgaggccattcttgcgaagatggttgaggatatggaatttgccgtacagtgggttccggaacaaaaggatatgaaagagatcggtctggtcaataagggagcttgccgcatgttactttctaaactttatctggcaaccggacagtgggagaaggctattcagcagctgaatgaagtgatagataactccggttattcgttgatgacgaatacctttggtacttttgtcactcctttcaatacagaaacgtggcctattcaacgcaatgtgatctgggatttgcaccgacctgaaaataagttgatagcagaaaataaagaagtgatactgggtatgcctaatcgcggtatcggttcatcgaattcttttgttgctttcaatacaatgcgtgctctgggtccattgtgggatgacaagagtaatctgttggaccctaatggagtacaagctgtgaaaagttttgctcgtagtgataagaattatgactctaaatatgactataatcgctctataggtcgtggtacaggttatttgcaccctacttattactctcaatatggtatgtgggaagtgaatggagtagatgatgagggagatttgagacgcagtacaaagagtggaaactggatgatgatggattctgtcagggtcaataatccttcttccaaatattatggtcagtatcttcagaagtcttggtgtaaggatacaatccgtgattggttcggatggcctcactataaaatctatttaatggaccagaatgccgaggcgaaagaaagtagtacacagttcaatggtgcttctagcagctccactacaagtggcatagccgactggtattgctaccgtctggcagaggcttatttgctgcgtgctgaagcaaaattttataatggcgatcctgccggtgctgctctggatgtaaacaaagtgagggagagagctcagtgcaaacagctttacacaactgtaaccattggagatatcatggatgagcgtgcacgtgaattgtatctggaagaatggcgctatcttgaattgagtcgtgtgtcttattgccttgccctaagcggaaaaccggatgaatggggaaatacgtatgatgtgaatacttatgataaacaggaaggtacagacccgaatggtggaagttattggtatcaacgcattatgcattacaatgaattctataataaaaatccggagttgattgtgaagaaccataaatataccattgacaagcgtaatctgtatttgcctattccacaatcagctattgatgccaatcgtttgggaaaactacgccagaattatggctatgacaaatatgatgacagtgtgccgatgtggggaaactggcaggaggctgtagccgacgaagataacctgtctaactaaattgggcttcggctcttctgagtagtaaattcgcattttttcaataggtattataaggaacggggtgatcgttcttttcttgagatcaccccgttttcatttgtatcaatcaatatagaatcaagtatgaatagaataacaatgaaaggactgttttttgcttttctgactcttattttttgttccggatattttccgtgtgcagcaaccgaacttccgaaggtgtccgatgtgtccggtattatccataaagtgaacagatactggcaaactacgcatcctaaacatagttggtcattctgggatcatgctgcctatcataccggaaacatggaagcttatttcctgacaggggataccgcttactacaattattctgaagcatgggctgggcataatcagtggatgggagccagaaacaaagataagtctaaatggaaatccggttatggtgaaagtaatgaatatgttctgtttggcgattatcaggtatgttttcagacatatatcgacctttatactgtggagcctgacgaacggaaaatagcccgtgcccgcgaggttatggaatatgaaatgagtaccgatcgctccgattattggtggtgggctgatggactctatatggtgatgcctgttatgactaaactgtataaggtgaccggaaatccgctttatttggagaagctgcatgagtactgggaatatgccaatagcattatgtatgacgcagaggctggtctgtattatcgtgatgcgaagtatgtctatcctaaacataaaagtgtaaatggtaaaaaggacttttgggcgcgtggtgatggctgggtactggctgcattagccaaagtgctgaaagacttgcctcaaaatgataaatatcggtcagaatatgtcgaccgttttcggacaatggctaaagccgtagtcgcctgtcagcaaccggaaggctattggacccgaagcatgctcgatccgcaacatgctcccgggccggaaaccagtggaacagctttcttcacctatggtctgctgtggggcgtcaataatgatttattggatagagaaacttatgaaccggtagtattgaaagcatgggaatatcttgctacagtggctttgcaaccgaatgggcatgtaggctatgtacaacctattggtgagaaagctatccccggacaagtggtggatgctaattctactgccaattttggtgtaggtgctttcttattggctgcttgtgaaatggtacgtttcatcgaagatgcgcctatcgtcaatgaaggatatcaggtgacggataaaggtgcctggtgttggtttgccgatcctcgtgccttgcattataaaagtaaagatggcagtatagaccgaacctatatcggctacattgatactcatggaaatataaaagccatgcaatatgattttcataaaaagcagcagaaagaagtccttatccgttcctgcttccagccggatgatcatgataacccgactttcctgatactgcctgatgagcgtgtcatgatattctattcgcgccatacggatgaacgttgtttttactatcgcatctcgcgggaaccgggtgacattacaactttaggagaagagaagaaaattatcactgagaataacaccacctatccttctccctttattctttccgatgatccggatcacatctatctttgctggcgtggaataggctggcatcctacgattgccaagttatccctaccggataaaaaagataatataaacgtggagtggggaccttaccaattggtacagtctaccggagcgcgtccctatgccaaatatacgtcgaatggaaaagataagattcttttcacttatactacaggacatcctgatcaggagagtccaaatttcttatatttcaattatatcgatatacacactttgcaactggaagatgtgaagggaaatgtgctttcgaccatagccgatggcccgtttcagataaataaaagaagtgagtatgtagaacagtatccttatacggtggtagatagtcctgaagagcgtgactgggtatggcagatagccatcgacaaaccggggaatcctgttattgccatggttcgtatcagtgaagacaaaacctcacacaattattattatgcccactggacaggaaaagaatggaaaaagaactttctggctcatgccggcggacattttcatcaaagttcttatatcgagaagtgctacagtggcggaatgactattgatcctacacagacaaatgtgatttattgttctgttcccgtagaaggcaaatatggacggaaatatgagatacagaaatatatgctgaatgatgggggagatgtggttgccgttgaggctgttacccgtaattcccggtacaataatgtgcgtccctatattattcctgattcggaagatactccgttacggctgacatggatgcatggcaattactatgactggattgtaagtaccacacatccgttggggtattgtactgcgattcattccgattttcgaggtttccctgttaagactgaaactgagaatattgagatgacagttgaacaggctaaggattttaaatttgatcttaaggaagactttgtaatttccgtaaccctaaagcctgatacggtaaaatatcgtggctgtctgttgcaacttggaaaactggggtattatctgaatgccaatactatgaaaccagaggtacgttatcaaagaaaagtatataccagtaccaatatgctgggaacagctgatacttgggcaatcatgccacgtggtacgaatggtaaatggtatgttccgcagaaatactccgagttacgtttaaagttggaatataagaacggtattttgcgtacttatgttaacggtctgcttgatcagaccattgaactattgccatttgtcaggtgatattaacgcccccatgttaattcaatattggtctttacgataaaaacagtcaaggatactatataaccataatttaagtatacacatcaatgaaatcaaatatactaattctcttttgttgtttcttgtttttggcgtcctgccaagcttcttttattgaagagtacactctgcttcctcacccagtggatatcaaatatataccgggaatggtgaaactaaaaacgcaaccgacacttgtttatccgggtgaactggcaaatgaagcattactgctccaatgttacttgtcttctgatttctctgtccaggccacattaaagaaaaataagaaaaagggagatattatattacagttagatccggcagtattaccagaacaggcggaaggttatatcttagatgctacttctgggaatatagtacttaaagccaattctcctgcgggtatattaaatgctatccagacattccgacaggttctcaaagtaaaagacggcaggctgattgtacagaaatcaactcttacggattatcccgttttctcatggcgtgctttcatgttggacgaaggacgctattttaaagggaaggaggtcgtttttgatttgctggatgagatggcggcattgaagatgaatgtctttcactggcacttgacagacgaccagggctggcgcatagagataaagaaataccccaaactaacggagattggtgcatggcgtgactcttcagaaatagaccattttggcagcaatcgatatgatggtagacgtcatggaggtttttatacccaggaagagattaaagaagtagtagattatgcagcgaaaaggaatattactgttatcccggaaatagagatgcccgggcatgccagtgccgccattgccgcttacccttggctggggacaagtggaaaacaaatcaaagttcctggtaagttcggagtgcaatatgatatctttaatgtggctgatccacgtgtgatacacttcttgaacgatgtaatggatgaagtgataagtttgtttccggctcctatattccatgttggaggtgatgaagtgagatacgatcaatggaaagagtccacacttgttcgggaatatatgaggaagaatgatttgaggactcctgccgaattacaagtgttcttcacaaacaatgtgtctaatatattggcttctaaaggtcgtcggatgatgggttggaatgaaataaccggtgataaactgcatgagtttcaaacggaaacagatacgaaaggaaagcaaaagttggctccgggaacaatcgtgcattgctggaaaggagatcctaaattaatcaaggaagctatagagaaaggatatgacgtggtaaattcctatcattcgtatacttatctggactatacttatgaagctattccactggagaaagcttataattttaatcctgtgccggaaggtctgacagagaaacaaaagggtaaggtacttgggctgggctgtcagatgtggggagagtttatcccgacggtgaacagtatgaacttgaaaatctatccgcgcttggctgcctatgctgaagccggttggactcaatcttctaataaggattacaatcgttttctgaatgtattggatgcattcttgaagaaatggaaacaggaagggattattatcgaagagaatagtgcatggtaagaaataccagaaaggggcatattgggttaatgcccctttttctttatcggcaatcgtgggaacaacttcctgaaccgtaccaaatgtgtcgtaatattgcttccggctataataaatgtcacagccaggataatcaatacaattccgcaacacaatctgggtgtcagactttccccgaaaattgttactccgaagaatacagccgttacaggttccaaagctccgaggatggctgtaggggtagaacctatatattgcacagcttgcgtagtgcagaggaaggatatggctgtggggaagattgccaatgcaatcaggttcccccataaataccatttatcgacaacatgcaggctttgcccgaaatctacacggactaaaaagagtgataggccgaaaagcaatacataaaaagtaactttaagcgttgccacattctttaatataggtcggtttacccctacgatataaatagcataggagagggccgatgccatgactaacccaacaccaaccagactaagcgttgtaccgtctcctcctttatatagtaacccaataccacttaaagccaggaagatacataagactgtttgtaatgtgattttttccttgaaagcgacagccataatcagtgccaccaaaataggatagacaaacagtattgttgaggcaataccggcttccatatagttatagctttgaaacagggtaagagaagaaatggcgaccaaccatcccagtatgactaacggcaatatttctttccgctttagactaaaacttctacctctcgctttgagcataatccccaggatgggaatggcaaacagatatctgaagaaaagaacagaatccggattcataccttccttatatagcggaagagtaaagaggggattcataccataagtggcggcagcaacggctcccaatatatatcctttgacctttgtattcataaacactaaataatttcttagttctggttttctttgggggtgcaaaggtaaatctttcctttatatattgtcattacaaacctcttaatttttactttttcctgccttggatgacttcagttttcgtattctcaaaatattatttatctttgcgccatgacaaagacattcaaatcggatttggtttaataaacaatctgtgtttctgatacagattgtcccttcgtttactctcggataactcctttcgagagtagttttctattattataattcaagtttaatctgcgtacaatgatgaaggcattgttatgctttccgtgtatgcaaaatacattaagaaaatgagtaacgaaaataaaacaattcacgatttcgaacttaaattaatctgtgacttcttctccaatatggaacgccaaggacccggaagtcctgacgtaacactgaaagcgctgagctttatagataacctcacggacaaatcccttatcgccgacatcggttgtggaacaggaggacagacaatggtattggccggacacattcccgggcagatcaccggacttgacctttttcccgactttattgatattttcaatcgcaatgcaaagcaagcgggtttgcaggacagagtgaaaggtattgtcggttctatggataaccttccttttcagaatgaggaattagacctgatctggtcggaaggagccatttataatattggttttgaacggggattgaatgagtggcgtaggtatctgaaaccgggaggatatattgccgtttctgaaagttcgtggtttactgacgaacgtcctgcggaaatcaatgacttctgggtgaatgcgtatcctgaaatagatacgattcccaatcaggtggccaagatacacaaagcaggttatcttcccgtcgctacatttattctgccggaaaattgctggacagagcattactttgctgcaaagattgaagctcagaaaatcttccttcataaatatgcgggaaataagatcgccgaagaattcagttcgcttcagtttgatgaagaagaactatacagtaagtataaagcattctacggttatacatttttcatagcaaaaaagatagaacaatgattcatttgaataattacggttggaatgacaagttaagccaactaaagcaaaagtcaacatacaatgcccttacacatggacgtatatccatcgtacaccgtacatgttacgaggtcgtttcagaaaacggcctgtttcagtgcgaactgacggggaatatgatgtatggaaaatcagactttgaactcccttgtaccggtgattgggtgctttttcaaccattcgacgaacataaagggattatagtggatatgctgcctcgtgaacggactttatatcgcaagaaaaacggaacggttgctgataaacaggtcattgcctcgtatgttgacaaggcatttatcgtgcaaagtcttgatgataatttcaatgttcgcagagccgagcgtttcatggttcagatgcaggaagagaatattaatcctgtattggtgttcaataagactgatttagggtttgacaagcagaaagttgaagaacagatcagacacattgcccgtcagatatcggtgttttttacgagtattcatcaacctcagacgattctccaattacgggagtctatatcggcaggcgaaacggttgtgtttgtcggctcttcaggtgtagggaaaagttctctggtgaatgcgctttgcgagaaatcggtattactaacgtctgatatcagcctgtccacgggaaaaggaagacatacttctactcgtcgggagatggtattgatggacggttcaggtgtattaatcgatactccgggcgttcgggaatttggcttggccattgacgatcccgattctcttgcagaggtattggagatttcagattatgctgcatcatgtcatttcaaggattgcaagcacatcaacgaaccaggatgtgccgttttagaagcggtaagtagtggtatattggaccgtaaggtttatgacagttatctgaaacttcgacgggaagcgtggcatttctctacttctgaacatgaaaagcgtaaaagggataaatctttttcaaaactcgtagacgaggtgaagaagcgtaagtcaaatctctaatttctatatagacagtgcagctattccactaaaggaatactgcactgtttttatatgtatacccagtcaaatccagttaatctttcactcccataaatcggaaagcttgtgccggtttaaagtctttcgttgcattaccatggtaagtttccccattggctatggacaatttaagtaccggtgctccttctgacaaatccaattcctgtaagtttacccaaaaagtattcggtgtcaggcttgactcgaagaaatagcgcaagttcttactatccgaaaccgttctccactgtgtagtggatatttcaggagattcgggagtcgagataccataaggaactgaagcattacgaacaacgctgaatacgcttgcaattgcgattctctgatcatcagttttagagagtgcatctatgtaaaagctggctctcgcgaaacggtctgaggggcgattggttcctggaaggaaactcaatccgccaattgatttccaatattcgttcaggactaattgtttattgtaagtaggggaatttgtcatcactttatagtctttactatggtagacggtcagttttccacctatatactcaaatattgcacaatcacttgttgcatcagagattgataggtgcaaagtagccaggcgagaaccgtcaggcatcttatcggataccacttggaaggtgttttcatcaatgaaactaacagcctcatccacactggcaaagttgtccagcatgtattgtacccatgctgtaatggcaagtccaggtttacttttatcccttaccggatattctgtttcgggcagccacaatagattggccactagccccttttcatttatcccgtccgtgctggctatttcaaaagcagaagtcaccacactaccatacttggatgtccattgtaatgagtttactccggtttctccatttctttccattcctttcggaaatacccaaagattgctatgcatctctgttttccagtccattgagcgaccggttactgccattttattggttcctgaatatactactcttgtacacataatgaagtatttatatatctatgatttgaattatctgtaaatatcaatcatcggttactatggctacccttccgctcagatcaagaagagaatccatattcgttgttatacttttatattcagacaagaacataagtatatgaaaacggttcggcggggatatttgttttatgaataataaacacagaaataattttcaatacatgctcgttcgttaataggaaacgtatcagtgcgataagcatttgcagaagtgaagaaaatctttagccgctatttaaataagctatacgaaactcccagattgaagaaaggaaccatgtttcgtttcatttttactaacggttccacttctgtctggccttcttcatttcgtacttttatgccttttcttgtatcgctgtaaagtccggccatcatcaccatggaagctcctgcgtgtgcaaccagataaaagtgtttgttaatgatgtattcgtaaacgatttctggatttaaagtagcttcgctgaaatagcagatgtccggcacattcttcaggttgggtttcatgtagaaattatcacttgtcatggaagctccggcggaaaaacgatgactgttcagttggtatctcatgtaaaattggcttggcatggtgatgtctacgcttagattcggattattgaatcgatgccagtaagaaatgacaggcataatcgggatactactgaataaggtcatccccatgatgccggctgtgaaagtggtagtctttgtatgcttgaaaatcattacggcagacaataacccttgtactttgccaaaacctttgtcccaaccgtctgcaattacggaggcggatagagccagcggtttgttgaatacattaatatagtaggtaccattcagtcctccggcaaagtagtcatacccgtcttgtgaaaatatagctgacgtagcggagtgggttttctcaatcgcatcgaactgatagcttctgtattgcacattggcatacaacgatactttcttcaatttcagtacagggatcatggtagaaaaactgatcttgtgcaggtcgcgtctttttcctttttccagttcatttccatcttgtgtaaatgtataattgtgtgcccacttggtttcccagttcaggtttactgtacgatacatagagaagttcttggcaagaaagtttctgaaatcttgagccagtgaatcggggatttcctgtgccttgactgtgcagatgctgagacacaacgctactgtaataaatattttcttttgcatttcgtttttaaatagatttgttaaattattcatattttttctctactcatttgttgatttataaactggcgcaaaagtataggtgattccggccgggagaaaggccttttggatggaatgttggacgaaaacacttattagtttggcttatctgtttttatggcctaattttgttgttaaaaacacatatatgaagaatcttatatcactgaactggcgttccaagttggaagggatggagaatgtgaatttcctgaatgacgactactatatttacagaaatgagaaagtagaaccacatacgggacctttcaaaatggatatgactatttgtggcatttgcctgaaaggagagtctaaagggagagtggatatgataccttttgagattaaagcgccagccatatccatcgtcttgccggggcagataatagagcatgaatattgttctgatgattttgaagggatttatatacttatgtctgaacggttcaatgagggcctgaacttaccagaccggttctcgaatttcctttcggtgcgtaataaaccggtcgtatcactaacagataaacaactggatgccatgctgacttattgtaagatggtacaaaatgtaattaaagtcacggataatcctaaccgtatggaaattatccgccatctcaccattgccttcttttatggattgggctattattttcataaactgcccgacggtgttaaggaaacgagaagtgaagtcttgatgcggaattttctgaaacaagtacaggctttccataaacaagagagaaaagtggaattctatgcagacaggctttgtctgagtcctaaatatctctcccagaccattaaaagttgtagtggaaaaaccgcaggagaatggatcgatgaatatgtagcgctcgaagccaaggcactgttaagatctaccaatatgaccatacagcaaataggtgacgaacttaattttccgtcccaatccttctttggcaagtatttcaaaaggcttacgggaatgtcaccgaaagcgtatagggaataagatttccgtttcctgtaaaagccgcccctattactttggggtcgagtggaaattcttgtacctttgcactcgtttttagaaaagaaaaatcacgatgatcaataaatatgaagaacgtctgggaaccgagcgtatgttgccactggttttcaagatggcgcttccggcagtagcagcacaattcgtcaatttgctttatagcattgtcgaccgtatctatatcggacacataccgggcatcgggacggatgcattggcaggcgtaggggtaacaatttctctcgtggtgttgatttcttctttttcagcaatagtgggcggtggtggtgcaccgttggctgccatagccctcggacaaggtgaccgccagcgcgccggaaagatattggggaatggtttcaccttgctgattctatttacgttaattacttccttcattgcctataccttcatggagcctatcctgctctttacaggcgcttcggaacatacattgggctatgcggtcgattacctttccatttatttgctgggaactgtttttgtagagatttccaccggacttaattcctttatcaatgcgcaggggcgtcctgccattgccatgtactctgtcttaatcggagctttattaaatatcattcttgatcctatttttatcttctggtttgatatgggggtgaaaggtgctgctttggctacggtgatttctcaggcttgcagtgccgcatgggtactgtctttcctgttttcccggaaggcttctctgcctttggagaggcgctatatgaagttgaatcggggaattgttgttgcgatgttgggattgggagtatctccgttcattatggccagtacagagagtttggtgggctttgtgctgaatagtagcttgaaagattttggagatatttacgttagtgcgttgacgatattacagacttcgatgcaatttgccagtgtgccgctgacggggtttgcgcaaggctttattccgattgtaagttacaattatggccatggtgacaagcagcgtgtgaaggattgtttccgtattgcactgatcaccatgttctcttttaatctgattctgatgctgcttatgatcctgttcccgtcaacggttgcatcagcttttacaagtgatgaaaagttgatagaaacggttcgttggaccatgcctgtctttctgggtggtatgaccattttcggcttgcaacgtgcctgtcagaatatgtttgttgcactggggcaggctaagatatccatttttatcgctttgctccgcaaggctattctgttgattccgttagcactgatactgccgcattatatgggagtgaccggagtatatgcggctgaggctatatccgatgctacggctgcaatttgctgtacgctgttgttcttttggcagtttcctaagatttttgggaaaatgaagacgagataagtatatctgtgcgaaaaataaaatagtctttatattttaatgctatagttcattatcttatagagctagataaactttttcaacaagtattttatattttcttttaattttgtgtataaacaaaagttggaagaatctttattctttttttatcgaaatgactatctttatgcgagatatttatatgtcaaaacaaaaggttttagtcgtatggtaaagaaaaaaactcatatagacttctgtcatgaattgaaagcacagaatttaaaagttactgtcttgggaacatacaaggattacaactctaaaattgctgtaaaatgcgataaatgtggttgtgaatggtcgccgcgtgcaggaagtctgttgcacggacatggctgtcccaggtgtgccggagtcaaattgaaatctcatgcggagtttgtgaaagacttaaaatctctgagagatgacgttatcataactggccggtatgtgaaggcactcgaaaaaactaaattcagattcttgaaatgtggacatgagtgtgatatcactcctgcacatgttcttagtggcaggggatgtccggaatgtggacgatcccagaaaggagcgtctcagcgcttgacgatggagatatttttggagcgtctccataaaatcgacccgaatcttgttgtcagcgaaggtgcaatgtatataaacaatcatacacttatgccgcttcattgtaatgcctgcggatatgagtatcaaataagacctcatgatgttctgaaccaacgtggctgtcctaactgtcacaggtcctgcacctcctttttagaacagtttatatatcactcatttgctcatattctgggcgaatctaaagtcatgtcaagagaaaaaacggtgataggagttgaattagacatatatgtgcctgatttaaaagtagccgtagagcccggttcgtggcactggcataaaaatatggtagcgaaagactgggaaaagcatctattgtgcaaagataaaggcatcaaactcataactatatacgaccactatgatgatgcaacagttcctttcgataattgcctggtgacacattgcgatcttgtttctcgccggaatacagataaactgattgaaataacaaaaaaggtcctctctgaatttggattaaattcgaaccttggtacaagtgagtgggaaaaaattaagaagaatgctcaaattgattcaagacgaatgagcactgaggaatttagagaagaactgtctaaaataaatgataagattgaaattattggtgattttgcaggagctaataatagaattaaagcacaatgtaaagtctgtaatcatgaatggcatgtgagaccgtcttctttacgtttaggttcgggatgtcctaaatgtgccggtactttaaaaatgacacataatgactttgttgaaagattaaattcattacagcccaatattatccctctggcagaatatatcaatattgatacttctataagaataaaagtaagcattcggccttgtacgtgtttctctccaagctataataaagtcaaaagccagacgtaatacgtctggcttttgactttatcagtctttcttgtttatcccttccaattaaatggcagtaaatcggagtagtcgtttttctcttctctttctttatcctgtactctaatcaacacgtcctgcatccatagtttcgggttcaccttattttccctgcaacatcccatcagtgaaaagaatattgccgctgcgtgtgcggcttcatgcgcccctgagaagagtacattctttctgttcagcgtcaggggccttatggatcgttccacgggattgttgtctatacagaaccgtgcgtcattcacgtatcccgatagctgttcaaatcgtgtgtacatatagaatatggccttggcaacaggcgatttatcgactgtatgttcatattcctccttgcaccatttttccagtcctttaataataggataggatgtttcccggcgaagctttactacagcctccccttccagatgttctaccctgattttctcctccacagcatacagtctgcctatttgttcaagtgcatgccttgctctgggagggtcattcccttccgcttccacaaacttgcgcctgacatgtgcccaacagcacaggtgcaactttccgggtagcgtgtcgaactcgtcatatactgcaaagccgtcgctctgtaccacccggacctgtcctgccagcagtgtgtctattccgctgctgccacgtcccttgtgatattcaaagaagggggtatggaaccggggcagatagaagttccacatatacccgcgatgaagggcaccggggcggtcgctttcaagtacgggatggggcgtctcatcggccatgacgtaataactgtccttaaccagttcacgaagctcattatagatcggctccagacgttgtgcggcagccatcatccagttacttacggtggaaggactcagatggatgccttcacgctcaaaaatgtccaactgcctgtgcagaggcaggtgatcgtaatatttggcggtagcaatgtgggacagtacactctccgacgcattgctgtgaggatgtgccattacgggcatgggagctgttatgatacgaccgtcggcaagccggtatttagggcggatgatacgtctcacatagaatcgggcagggctgacggcatattgttcgctcacttcatcccccagcttcgtcgctccctccagcgaaagaccttccggcatgggaatgatgatttcttcacggggaagggacgggtcgatgggcttacgggcgtggggagtaatctttttggtgaagctcttacggaaacggttgtaaccagtctccgattgggcagatttttcagccgttttccgctcctccgctaccgggtcattgacatcggacggagattcaaaacagatgctcaattggttggcgtcttcgggaagatgacgtttttcactggatttaccccataaacggcgtgtcaagtcagccaatttccatctcaggtcggcaatgacagcggtgcaggctgagatttcctcgacttggcgggaatactcctgcaaagaggcttcgtattttctcagaagttccgcatgttccttttcaagacattcacgttccttgcgcaactcttcgtactcttccaaggtaagggtaatgactggttctttcactgtatatccacttttttattatgcggcaaagttatcaaaataaagctgtacggattgtaggatgggagattacttttcaactgttttccgatactttttaacagtaagcagctcattcaggcgattccaggaaatttgaagaaaatctcttttccgttcgtcctttttcaagaggaaagaactgtggttcagacggcggcattccagacggtattcgtcctcgcaccgataaaggatatgcaatctgctacgggaacggtcaagaaaaatatggcaactctgccctgacacgcaagaacccgtatgccggatgacctcgccacaaagaccgtcaatacctttatggaaattacaaccatttggataaaggtaataagaccagaaaggactgctacggaaaagaccaagacctaaagggagaagtagatcctgaggagaatggatgccaagactggaagccgaaactttataacgacgaccaccatcaaatatgaaaagaacagaatcaaaatgattagactcggaaaagagactacgcagtttctcactttcactagaaaatactaagactgaacacataatggattaagatgattatgaagacacaaaggtaggaaggaaaagaagggaaagaaacacgcacaaggccgaatgcttacgaataaaatgtaaaatatgtggctatatatggtctacccaaccctatcatcttgtagcgaaatataataggaccggctgtccgaaatgtgccaataaagcacggagaacccattatgattttgttgaggaaatcgcaaagctgttgcctacaattaaagttataggaacctatgtaagcaggaataaacccatatttgtacaatgtagtgaatgtggcaagacctggcaggcatatccgggaaatttattgcggggaagcagctgtaaaagctgtaaattcaagaatacagtgcaacaaagaagtaagaagataaggtgtatcaccaccggagaaatattcaatacatttaaagaagctgccgaaaaatacaatataagctgctcaacaatctgtctgtgttgtaatgatagctctaagcataagcatgccggaggattggagtgggagtatactatactgtgaattacgctttttctatgtttcgggctttactaatttacagcctctgatatttccaaacgaaatctcttcaaaccaaagtaggaagaaaaccccatcgtttccttcctacccgattctttattttcagaagtttttttattatgtcacaaagaccttttttatcatttcttcttcatttcctatttacggtgcttctgtcacattaactgttaccgtcaccttctttgccgcatccgacagattctgtatctcaaaggttgccgccgcatttgccgggaatggtcctgtggggaaatcctttgcattttggtccagcgtcaaggtatagtctatagcctcggtgctatgtccttccgtcttatccgctttcagccaggcaggcaaaccaacaatccggctaccgcctttggcagtcacagtaagtttcatggacgaggtggttccggcattcgcctgtttctgcatgttgagtgtccctgtgatcacatccggtgattcgcttccggcagtgtaggtatttgccgcatccggttcggacggtgtaactgctgccgcagcaactgtcggcactcctacggccgctttcactgcaatctggctttcttcgcgtcccgccttgctgcgcaataagatgatggctttcgggaaaagattcccagaatatccatcggcttttgacactttacaagtatacgatgccgatccggcacgggttaccggcgtgatttccgtcttcagccactcggcactgccacctgcggaacttgtatagacaatgctgcattccgcttccgaattgctggtgaaaggaatactgaaatattcagtctcatccggggagacggtggctgtattgttacccgcaatagtggttgctcccactcctgtcagtgtcccgatagccagctcattttccggctgatactcaaagtccccgccatccgtccagtccgaaacggtgatgttcacatccagcttgaacgggtcggcatcagtgatgcgcaccgtgtagcggtggttaggcttcacctcgatgtaaccgcctgtgcccgctaccgactgctcaaactctaccatgtaactcacctcctgcggtatatccgtctggttcagcgcatactttcccttgataatcagataccccttgtcggcaatcggactgggataactgtagaaagcccctgtctgtgttcccttattggcattggtgccgtcaaagtcacggtcggggtaggtgataagcgtcttgtccggatcggcatcttccacgggaaccaccgggaagaaggtaacgcctttgcgaccgtgtcccatcgatacaccggtgatggtgagatgtgacaatttctcgtcattgatgatatcgaaacgggagacgatacgcgaaagtgtcatattgatgcgggtacgggaccccatactgatatcccgcaggtcgagcgcagggctgtaggaacctaccatcggcaggggtgtcaacaagatgtccgtatcctcggcagggtccagcaacggagtggtaaaggtgaggaaatccgtttcggtgggaatccccgctttggtcacaatgttatagtccgcacccggtgaactctgttccagtgctacaaaattggtgtattctgctccggctttcagcaatttcgactgattggcaatgcagtagaatttggtgaacaggcctttcttggggcgcagggtggcgagtgctacgttgtcaccctccacggtcaatataattttcgtagcgttaagtatcgtagaaccgtccgaacgataacagaaccgttcctgataagtatatggcccttcttccttgtccgaagagaatacataaatatccagtgaagtgatttcattctcttcggtcgtggcgatgggggcatcggctcgggtggtgcctgccgtctttatgttcagcttgttctgaaaaccgaggatgatttcgcggcgcgtcgggtcattgaccagcgggtcatcaccgggagtagtggccgacggcacttccgcttcgctgcaacccgcaagggacagggcaagcaggcctatcacccatgcggaaaactgttttctatttttaatcataatcttattgttattaatgggttactgaattaaggagccacggccgccgcactcaccagcactgtcacgtcttccatgcccgagatattgtttttcagcacaatcggcgcggctgtgaagtcggtaacggcatccttcacggtcagggtgaacgtctgactaccggtagcatccgtcggagtggttcttgcaaaggcagtggtctcggcaatggtgaaccaggacgacaacgtacttgccgtcacgccttgcggagaagtaattttcacctcaacggtgcttccgtcagtgcggggcacatcggtaatcttatagttattgtaagcggctccgcctgttgtccccgtcagttcaatcgttgtaatggcaggatcgagcaattccactgtcaattccagtttctgggttgcgtctcccagattgataatctcgaacttgctgtttacatcgctggttgccgtcacgtctttcagcataagcgtgtagtactcttccaccggagtagaaacagaaacatccgtggcgggagtacccgtcgtgcttggcgcagggcctgatttgctcttcgaaacttccagccagggaagctgattattcaatactaatttcgttccgaacggacagcttgccccgagtgtgatgctgctcttgctcgttttatacatcgtgagcttaccattcgcctgatcgtataagttgaagttccccgtagccgcatccggtgtggcaaaatccagtaccggtgccgtggcgggcggcacaatggccagcgtagtataaaccgattcatcctgtgaagccgattcattggccagtgtcagtgtaacgggaacataaggagtggcggcagtcagcgtgtatttgaaggtcatggtagtggtggttactccgtccacgacttccgacttgtaggcagtaacgtcatgctccagccagtcaatgtcccatcccgttgtggtgctgaacttcggctgtaccttgccgctggccgtagcggtcagcgtgatgattttctccgtaccgtcggccgtcacgctgatttctttggtggcaacgtctgtatcagttccttccacatttagggcggtcactacgggcgcggcattgtcgggcttgacgatgactccgccgccactggtccagtccacaatttcaaagaaggcggtgatggtggcttccatcacttccttgatgtgcagggtgtaacgggtgttggccactacgtctatgaatgcagtcgctccgccggtatcgggagcacgctgtatgtcgagatggtattccacgagcacagggtctttctgcatcgggttctggtatttgcctttgatgatgaggaacgcctcgtccgtgtctttcaaaggataggtatagagggcgctctccgtcactccctgattggctttgggcagcatcagatagctgccttcggctacggggtactcaatgaggttggcgaggtcggggccactgagttctgccagcgttcccggcatcactgtagcctggttgcgtccgtttcccagcgcgacgctttcaatgatcagtcccgtcttggcggattcattgtcgatgtcgaagcggctcacgcggcgtttcagttcgatgttcaccgtggcgatattgcccagtatcttcgttgtgccgcttccggtcattactaatggagtgcccagggcggtgcctgccggctccagtttggcggtacagtacttctcaaagtccgtggctttcgtgccggcggtttctatggctccggtggcggcgttggttttcactgctaccagagggtctatcgggtctccgtcggctttgtagagtgtggtgctgttggccacgcaatacagtttcaggttggggatgcccttcagttccgtcgggaagatggaggccttgcgggcggttccggcaccgctcagtttgaaggttttcgctgcggtgtcgtcctgtgcggcggctttccacgtttccagatactggtagtctccgccgtcggcggtggctgcaaatacatagatgtccaggttgtcaatctggttctcactttcggaagcgatggcgcgggtgtattcctgcgactctcctccgccactaaatacgagacggatctctttgcctactccttttcccggagcgtcgtcggtgccaagctccccctggctgcatcctgcaagcagggccagcagagccgacatccaaagcatgtttttcgttttcatcatttgtctatactgtttttgaaagttaataatcttattgtgaggcatttcccgggccgtactgctacgtgtggcgtagacggtcagctacgtcggtagtagacggccgtctatgccatccgtaggtggtcacctacgccacacgtagcagtacggttgccgccggactatcctaacgggtcctcttccagacctccatcaggaccgagaccgcctccatcgggtgctttgcctatatagatggttttcatcacgctgcgcggcactttcagcatggtcttgctgttgctgccgaattgtgtggttactttgagttcatacgtcccgtccgccagatcggtagggatgatgaacgtcagtttcgagggatcgtttgtcacccaaaggtcttcggctactttggtttcctttcctgaactgcttttcagggtgatacccactgacgggtcggttcccaccactttcagcttgccgcctgtgagggtgaaagcacgtcctgccgtggctgaagcatcctgtgcacgggtggaggcatcctgtacgccgccgatgtacatggcgctgcctttctcgccgatgatgcccactgtggttgccttgatggcttcccgcaggtcggcgcctacgttgaagttcaccacgatggagttctttgccggattccaggtggagttttctatgacgccgcggaaagcgaccgaggcgtaatacaatcccgtgttcacgctcatgccggtcatcagcatgcgtttgatgacccgtttttgcaggtcgaagacgtggcggatggtttcttcacgcaggccggagtcctccgctttcagttcggcaatgatgcggttttcgtccgcactgccgatggatacggggacgaggatcatgtcctctttgttgtccacggttacggtattgtccgccagttggccgttgatttgatacttgatttcgtttgccataatttataaatatttataatgaatactatcggtaaaaccggagtcttgccgttgttaataattcgaataattatggcatgaggaatgagtctcttggagaaaagccgggagggagtttcacaaaaaaatcattccaacatgtcaaagaacgaaagctcgtttgacatgttggaatgattttataaatatagggtaacgcttaaaagttaggcgttagtgtgcgatgttataatatgatagtatttgatatgcttgttcatcaattaactttttcttttcttcttcactgagtttcataattcaactccttcctcttctacatttttaaagaatggtgtaccttttcgttttatccattcggatagggtataaagtttcatgctgaaatactctccaaggttccaccccagctctacaaaaggataagcgtaagtatcgaaatctgaaggagctattttttctttatctaaaagtaataacatatcccagtcagagtcggtagtagcatcacgacgtgcctgcgaaccaaaaagaataagtttacctgatggcaatacagttcctttcaactctttaattttatctataatcttttctgtagtatgggccataatcttattgttttgatgaaggctttacaaagataatcataatttctattctcagcatcccgaagaacaggtttttacgtttttatcaaaatgtatattctatttatagagacacttttgtatattataaaaatcattccaacatgtcaaagaacgaaggattctaaatcttaatattagaggcaagcggattacaaatccgcttgaacaggcatatcaataaggtctagttattctttagttatggacaagcacataagcttgttcctctgttttaagcggacgtccatacgctcctgcagttgaagtataaacatccagcactctggcgtattcaccagaaccatcattcgctacagtttccgaactccaatgacgtttgtcaagtatgaaagcctttttgacatagttttcatcggcgttaaatgtgcgtcgtgtataatcatcaacattattatagctgcttccagtccatcctaccagtacgcgatagtcccacatactggcaagtcgccagctgtctcctgcactatttcctgcatttactgcttgtgtccatgtaccagtataaggtatcgcccaaagcccatttaatttacaaggagttttgcctttgagtacagggatttgcatatataagtctatttgatagtcggggaagcgattatcttttgctgtgaatttgtaatagtatagattgggggaattactaaatgtcgctgaattcttgaataaaagagtaaatggattttttatattaccgttgcttccactttgacttcctgtactgacttgtgtaaaattttgtgcatttgattctgatatagatgtgaaattatagccaactggagatgtgaaaatgaatgtaaatccggtttcaccagctgttcctatattctctttaatataaatatctatgtcactagtcgtgcagttataagtaataccttgtccatcccgatttgaagttaccgtaggcaatgatgatttaaaagtaaccgcaattgcttctcttttcgtttcatctgataagttttttacatagagtgttccactgttcacatcactgagtgataagctgctagttttgtattttattacataattatgctctttcgtattagattctgcaaagtcagcttctactcctccgggtaattgtaatacacttcctcctaaagagtatactttcaacgttgctgtagaataataagacgatttcaactgatacaagttcagtgatttgttacttgatatatacgaattaacagaaggatctgtactgactacctcaatggtgggcgtttggaattctctcgcaatattcatcgtcatactcgtacctcccgttgcattagtgaacacgatttgcgtatcatcaaaacttgttgcgtcttcctttagtttgaaagtaaaacttactgttttattttccggtgtgctacgtgtagacactggtgtaatgttctccagccatgacgggcacctgcttatggtaggtttactataattatccatcgttagggtgaattgcttgtccttgatgataggcatagtaagcgtggctgtggtagctgtaacagctgagagtgagataccgctaccttcgtttgaaagtgccagattattgattcggttaggtagtaatttcactttgatattctcaactttagtctcgtccgaatgattttttatagctacggtaatttctttttccgtcaagtcggtagcatccgtgcttgcccattggaaagtatattcttgtgtagtatttacacttgaagtaggattaacggtaatgcccgaatgggctggaagttccactttgctgccgccaatagaagtgatatttatcgtgcctgtagatgtattggtgccgataacttgtaccagatagagtatattgtccgccgcatcccatttatttactccgtcaggattcattgttccgcctgtggattctacgacaggagtaccaaaggtcgtatctattagtatcacttcttcactgcctcccgctttatccgttaggtgcaggataccacgaggataactgtcgcctgcgtaactttcattgaaagaaattttgtacttcacttgttgcgtggctcctgttcgtgttgtggtgacggggacttcttccaatttcaaccagccgtcagtagggctgttaccgttataagtcagttgtgcatttactccggcattggaacctgtggagatagtaaaactacttcctgctttgagcgccagtgtcacaatattggtgctgatgtcgtaagtggtttcacccacaggcagcaaatcagctaccgcaattgtctccaatccgttgtcgggctcgtaatcatctatatagtctcctgtttcccaatctaccagacggatattggctgtcagttcaaaagggtcagcttctgtgatctgcaccgtatagcggtggttgtggtttatctcgatgcgcgtaccgttaccgtcggttacacgttcgaaagggatgcgataagatacctctttcttttcatccgtcaggttcatggtatacagtcctttcaaaatcaaaaatcctgcatctatggctttacatgggtagcaatagaaagctttggtggtagttcctgcgttagcgttcagtccgtcgaaaaggcggtaagggtatgtaatcagttgaccgtttgtggcgggaacatttcctgtcggacgaatggggaacagtgttacaccttgtcttccgtttcccatgctgatatccgtgatcgtaaaatgagacttcgtagcatcgtttactatatcgaagcgtgccacggcacgagtgagtgaaacattaagtcgcacgtaagttcccatactgtattcgcgcaggtcggtgggctggctgttggcaccggacatgggcagaggggcaagcagtatatcggcattaaagccggtggaatttaatagcggggtattcagtttaacgaaatcgttctcggtgggtgttccgggtgccgtcaccgcatctcccgacgcgccggattgtggttgcgaactttgttgcaacggggtataatttgtgtatgtatttcctgcggcatcatccatttcggtttgattggctacgcaataaaacttggtgaataaacctttgcgggggtagaataccacatttatttttccggcggcttcatctgctttcagttcgagaggggaagcacccgcgggcagggttccggcatccgaacggtaggagaaacgttcctgaaaggtataaggcccttcctccttgtcactgccgaaagcataaatatcgaaactttcaatgcggttttcgtcctcctcagctataccgtcgcgggtgatagtccggctttcaggtgtaccgtttacaaggatcagcttgttttgcaaagagattaccaccgaacggcggttggggtcattggcctgcgggttctccggtgtttcgggagtgccgcctattgtttccacttcggaggtgcaaccagccatcaggcaggacagtatcaccaatgaaaagtgcagaaagaatttagcgaatgttttcatgcttgttacttttatgcggttattacttatttccattcctcgttctttttattctctattctgttttctgtttttcgttctttatttttcattcttcattttcttcaggttcttcctcgccttttccggctctatacccagtgccttgcgaaaccattcttccgctttcttccggtcaccttccagataggccagcacaccgaaatcattccatgcacgcgggtcatcagccaccttgctcagatattgccgtgcgctaaccggatcacctgccatgattaccgccgaagccgcattaatattggccagcacgtcgtccggaaagtggtaggcggctatttcataaatttcacggtattgctccgtaccggggcgatagaatgcggctacccggtacatctcctgcaatgatagtaggcggggatgggtatatatcagacttgccgcctcttcgatattgaaagcgcgggcctcataacctactgtgatacggatacgtctcaactgcggaaaatagcttttcagaagttcccgatatacggctcctccgtgcatatccatcaattgtttttcgcgtccttcaaaaatgccggttcgggcaatgagagacaatacttcgtcaccgtgattcatggggtgacgttgcagaagctccaccaatccgtcccagtcttcgggtacggaagaaactttataaagatcgtaccccggtgcatacgtggcacgcatatactccttgaaacagcgtgcgcggttggaagccagtatttcattgtccttgtagatcccgtcgggcgaggcgtatccgcagatggagatgctcgaaatacttgccagattcccttcggtgagcgggcgcatcaggctgtccagtttctccaattcgggtcggttgttgtggaattcgcggcggacgtcataaactccggtagggtagtctatatataaggtggcgctttccgaacggtgtttctgagtttccatatcaggagtgaggtaagtcaccatggctgtacactcagcacagggcatacagtccggcctgctttgggtttcttgccggttggcggcattttcatgtctttctgtaactgcctgcgggattgccgtctgctccggcaggtttacagcctgtccttgtgaaacggccatttgcctctgtgaaactgatatctgtccctgcggaacatggaaagggcttgtcagggcaagatcggttatcaccggctctactccgagcatcttcatccggcagcaatcccgccgttcgcgcatcaacaccaatgaggcgtgttccatccatgggctataggcaacggacaccttataaataatgctgtctttccggtttctgttataaagcgtacggtaaggaggcaaatagccgggagacggttgaagcgcctgccgcctgtggtcggcacgggcacggcgacgtccgctcactaccacagcgggcagctcttgcagacgccctgcgccacgaagcacgggagtgaacagataagcctccgcattccccgcttttgcatcactcagattgagcagcagttctatgtgaagactgtctccctgcgtaaagacatgcgaaccgagtgttaaagttccgcccgcccatgcttccacagtcagcagtaccccaaccagacatcctattattttcttcatccttttcatccagcctctttaatttttaattattaatttttaattgcctttttatcccagtcctccgccttccgcccagtccgacgaactgagctgtgtcactacaatcttctgcccgatggttaccagcaggtcgaattcctgttccgtgttttcatccagactgacaggcagtttacgaaagaacagttgcaagtcaatctccttcataatccgttcattaccccggtagatactcagcaacggatgtgatcctgatgtcaggcgatacgttaccaactcgcctgtcagttcatcgttatagttcatcgccgccttggcctgatgccatattaccgggctgcctatggagggaaatgtgaaagctccgtccccaccggccaacggtatgtcgtaacctgccggaaagccgtattcgcaaggcacgccccgcaggcggaatgtatatcctcccgttccttccgccggatagtatccgtcttcccaatgtacggtaatccggaggacggcgtggcagtgggtcaggtagacggtccggttcactgaatttcccgtagcgggaatttcaaacgtgctatatccatagtatagtctttcggtgtttgaacgatattcgcttgtggatgtccctgtgggtgttcccgtagccgaagtcattgccagttcacggatttgcgtcacgccgggttggggtgcgggtactacatcgctttcatatccccagtttccccatgccacgagggtatatcgtccgggagctaactctccctgccaatactccagactgtcacctttcagtaaccggatgtccttcaacactccgtccgcatcgaaaaggaactggtggatgttgtccacatacatggagagttgtccggcgtcgggcctgccggcatagcggtaattcagccgtgcattgtaggggcacactcccggttcgtcaaaatcgaacgtgcaggaggtgcaaaaccatagtatgcaacagaggattaccataactttcatcggatgaaataaatgagtgacacaccggcccgtgtaggcccgaaataattccttttataatgtcccatgcgctcgccgcagcccgcgcaccggtatttatcatattccatgcgggcatatccgccaccaattacggcttctatcgagaagcggtcgcccagcacccagtggtaaccgtaagtgaaacctccgccatacaggtcgccccggtaaataatgtcttccatacccgaaaagaaaggaatctgtcctacgttgtagtaagcgtaatgtccgtgcactcccaggaagtgtccttcgaacttacggcaaggccagtagcgtaattccggttgtatcaggcagagattcagcttcatatcattgccgaacttccaggcattgtaagccccgttcagtgccattgtgaaatgacggctgatgctggtttccactcctgcattaggtgtggtagttccccacaatagcaggtcggtgcgcaatgccacgcgttgggcaaaggcaacggtactcatcagactgagcagcaggaacagcaaataaagtcgtttcatggcaattcggatttattgcacagtttagatatgggggatggagttctcgataaggcattcgctcacgggaagttccgctatggaaatttccatcagataaaggcgtgtcatctgattgacaatgcccagtttgcgggctgtcgtcccataacaggaatagaatttttcgtcactggggcggttgaagtaaacgccttctcccaatgcttcaagaatggaaaggaggttgatttgatgatatgcacaggcaaggcggtaggattccgggcggttatcagactgattatccggtcgattttctatcagtgctatcaggcgtccttttgatagcttttgcagcaggtacgtaacttcggaaggtgaaggattaagggaagtactcaactggtaatccttatactgtatgtcgtgcagtactgccagggcgagttttgttctgagtgttaacatagcgcttgctttttatgtagataattgtctgttttgtttggaatgttccgattcccggtaggaaacggaacgggcgctatcataaccatagattggacagataaaaatcatcttccattttaaaaaggcagacaattcttagctcttccttccctctattcttagatttagtaatgagattcccctatattgagatatgggtaggggaattatgtattcaaacaaaaaaagtgaaagctttttaatcaatacaaagagcttttccactgatataccatattattacaggaatataatatttattgacatgactttttgagacaaaatctaactttcaggataagagagatgtttttgtcgtgtctggtgttgtaatttaactgattttttacagaaaactgggaaacttcgataagtatttcctgctttccttgtttatttcaattggaaattgttcctttaccgccggaatcgttccgtttcctaccgggaatcggaacagaagtatgaagctcattcttagtgtttttcctcactttatcattcctatttccttttcccttttctttttctttcctcttccattccttttctgccatcggattaaccaacgctgccatttgcaaattcaccaccgccagttgttcatcagagaacgacctcaaataagtatgtgttatctcttccgaagcatggctcaatcctgcgctaattttggctaccggtatatcctcattatatgccaatgtcgcccatgtatgccgcgccacgtatgaagttaacctcacttccaatcccaatcgttcagataaccgatacaaatgtttattgtaaagtcgcaaggcactctcatattgtttcctctcctcaggtatacttcccggttggcgtataatccttaataaatagggtgaacccgaatcctcacataaatacctctcgataatttcccacatccacggttcaagcgtaatcgtcaacatcctccccgtcttgctacggcgatagcaaagtacattatcctgaatatccgtcttccgtaaataagtcaaatctataaaaggaatccctcgtagataataagaaagaataaacagatcccgtgccacccccaaacttggtgtatcctccaaatcagcatccgccaccatacgaagctgttcaatactcagcgcccttttccttgtctcttcataccccataaatacctcacaaaagagccgcttagcgtctttcaactctttctccttttctgcttcccgacaaatagcccgcaacgctcggaaatagcacgctgaagtattacgtgaacagcccgaagcccataaatagtgttcaaaacccaagaagaatcctgccgtcaattctttaaaagtaacaaactccatgttagcaaacccttccaaactatgcagcatactcctgcaagtatgctccgccgagaacttaaacaacttccccaaaccatctgcatgggatataataccctcctttaatgtcttcattttcatcacactgttctttttattaatgattattccctcccaaactccactctccattatttgttttgggtaagaaaaagagagaaacttcaaaagtaagaacaggaaaaatggctacttgtcatgaaacgagcataaatgtcttcacctaatatctataaataaaaaaagtagccatctacatcagatgactacttaatttcttatacttcgcctgggattctccttgaagagttaccacgctgatatttaaaactttatatttttagcttcaagcatatcccatgatttaacccactaatttgctacgtgcctttgcggtagtttgctcatggagaatactaagagcaaagataaacttttttttcagatttacaaaatatagaattatagttataagatccattttcggtacaattgcttcttttcctaaatcttctgtaagttgttgcttgtattctatcggttagtttcgaaattcataattatacaaattttccttcttaataagataatttttaaagaaacgattttaggctatgatcagattcagattttgagttgtaactcccatcaaagtgaaactctcctaaatgctcaccttttgagttatgaaattcaaacattccatgtcgaaagtctaaagaaatatattgttttttaccattatttccaataacactatagatatgcctcaaggatttagacagagcttgttcatagagtgtttctacacttggttgctttcggttgcaagcataagcattcactattttgaagcttttacctaatttttcagcaagccatgtctgtttgattcctttttcattgagaatcttttttatacgattcatgattaagaatttaatttggcttcaaatataggactttttttaggatatttgtaggaaccagcccaaatttacgccatagttacattttgatatatatatcatctttttagatttgttagacatcccttgtgtggaaaggctaaataaaacaatgattttaagaaatttactctttttataggcgaaaaagaagacatttactaaaacccaagtttggcatttccgtttcaggtttagaatataatcttgtctcacaaatttaaattgggctattatcgtccgaaacctcgcttcggtttcttcttttttcttttcacgggaatttgttgttcatcgttgttgttagattcatgagtaagtaaatctaatacagaggataaacccaaattagggatgctgaatatttgtttttcttcattcttgcttccttgattttcaagctgtatatttgtcagaatattgttttgtttgtttttattcaattctatttgtataactgtgtttctactttcattaccaatttgccgttccagcatatcgagttgctcggagatactataattcttcattgtgttataatactcaaaggattcggttaattgcctattgtagccgaatagcttatcgaatccttgttctacttgttgaaataagttcacacgatcaaagccgcctttgattattcccttctcggcgttcttgtgattagtaagcggggatagctttttcttattggattggtctttccggctcactatcaaatggcagtgcatattcagcttattatccgaacggctacgatcaaaatgaatcttaccgtaaaactttatatccgtagcagatagttctttattaaagttgttagcatattcagggataaatacctcacgaatatagcgtttcatggcttccgtttgctcctgctctgtgttacttatcgcctgaagttccttttccgatgggctgacatggatagcgtaaaacttagcatcagtttttagaagttgtccaatattagtatctatatcttttatgacggttgatttatagatattatcctccgtcagattgaaaaagccatcagtatagattcctttctctatccgttctaaatcttcatgttctaaatagttagctagctgtcggctacttccagcattattatacgttccatttgatggtggagcaaagtctatatacataatcctatgtatttatcaaattgctgatttcggtttttagattctctttccttttgctatccatcacaccacaagcggaaagttccgaatagagttgtatcaggtggagtagtttcttatagttccgttggtgtatctgataaagtgcatttatctgtttggactgattgtttatcacatcagcatgattacagaactgttcacttagctttttaagcacggctgtttgtctctcctgactggcttccagttgagagagaataagagtttctaaagttttaccgatagcatcaaaacgcaaagcaatagaatttgtagcccgtatcatgggattcagttgttcttcctcatagtgacggatgaaacgtataatatcatcctgcctcttatttattttcgccagttctgattttacagattcaggagcttcggatggattgatatgcgccttatctatatacccgaacgccaactttacaacttcactctttttcagtgaatagcgtttgcatatcttctctaccaaagctgccgtttccttgtctatggaaatggtagtgaatatcgtttttcgactgctgtttggcatggtaattacttttttatagaaatatgaatagataaattcctgataataagcattacaaagaaaatgcttattacaggtgtcattacagcgtgttcttgtaacacgctaaagccgaaggctttgccccgcagggcaagagggaagaacaggacttgtccagttccctcttgctcgatttagcgaaacgggctgaaccgataggtgaagcagtttgtgctaaatcggggtggtgacatagagaaatagcctaagcacagacttctttcctctgctaccttttgctttcagggctgatcggctaactgattggctttttcaaactgcttataggtttgaaaatcggcaaattcacgaacaaaagcccgaatatcactcgctctatagtacgttttccgtccgatggtaaagtagggtagtttcccttttgcccgataacgttgtagagttctgaaagatgcttttagcagaaaggctaaatcctgattatccaatagtttctcattttcatctaatacggtgtcggtattgataagggatttcaggtcttgcccgatttcggtgagtttctttgaaagtgttgccatccacttctcgaagttttcgttgtctatatacattttgcttcaattttaagttcaacattattattttcaatcgattgatgaagcaaagttccgcaaaacaaggttacagaaaaagaggagtagctatctactcccctaaaaacagtttttaaaatgctatcaataagcgaattgaaaaatcatcttttctaatctttacggttcttacgttttttgtcttctttaataatggtatttcgtaaagcatctaatgttttggtaagattgtattgcttacgattaaatacttcgtttaccttatcataaatactaccgaatttcagattgaaaagctgttcaaagccacgagccagacgaacttctggaactggctttccatcttctccgactatttgcccttgtagaaacagggcaataacgatttctgcaataccaataatccccaagtcttttgacttagggattacatatagatcggacttgaactctgtagtaacagatgaagcgaattgttcgggatgatttattttaaggttgattaattgcagttcagaatcaatcaaggataatgctttgtggatgtataaatttttaagcgcattttttcccctgctcgcattgatataactcttttaggggtgctatctcaatacgagtgagatttagcgtccgaaagatatgagagtaatcttctgaatagctaattgttactatctgcttaataaattcctcataagcatctttcatttccgtgttaattacttcttttgaggtatcagctaataagatgaaaaacctcgtcttcaataaatcattcataggcataaattttaaattgtggataaattatttatatatcaaagcgttagctttgtatgctgaatgatttcttgctttgtttgttctccaaatctccttatcttaggttatgattataaagtgttatgtaaagcctttatgccaatagggaaatatccaaagcacataaatagagtcccaatagtgcttattaactctatatcagggttgttcagaagtaataaacctaaaatcattaatataccctgccatttttttatacatttttcttttattaatcctacaccttgaatgattgcaccgataggtaatagaggaagtaaatagcaaactttcaacaatccagctttatcaacaataacttgtaagaacggactgattttaataaagtctgtttctggaagtgtgtcaaatgcagataagactaaacataaagcacctttatctacagctaaaataaatgctccaaatacgccaatgatacagccccaaaatccccaattctttccagaggattgcaatccgttcatgatgcctatcattgaaactataataaagggaactgaaaacatgacaatcaaatgcccgatatgataataagaattgttgtgaaagcgttccactaaatcttgtgctgtaaatatcatcttcatttgttctaaatgcgggtgcatcaagaaacccactaataacattatagggaagagcattaatgaaaatgctagtccttttgtttttacttgttcactgaaagtcattctgtaaagggatataccttctactgcaagggcttttcttctacaaacttcgatgcaagcaccacatagatcacattgcattatattcccgattctgatatctgcttttttgttctcttgggagaatacacttttaagacagacttttacgcacttgccgcatttagaacatagattgttatcaatcagtattttctttgtctccatattattattgtttcagtaatatgaagcaaaactaggcagaagaaaaaataaaagtcttgattgaggtcaagacttattctaatagtattcttttacgtatgcggctcaatgtttcaggcgttaccattatatatgaagctagttcttttagagttattaggttgggtaagtcggaacatctttgtaaaagttctctatatcgttcttccggggtgtctctatgtgccgaaataatattattccatgcgaaatataatagttcctctgctaagattctaccttgttgttgtgcttcaatatttgaactgtagaattcgtttacatcagaatgagataataaataaactgtactatctgttacagcttgtatatccaatatggcagactctttcttttggaatgcagaataattccctaaaggttcattagaaaaattgtaggctactacatgctcattgccgttattgtctatacaagtatatctgaaagttccttttaaaataaaaccgatataagaatgtttatctcctttatttagaaaatattcattctttttgtagtggcgcattcttcctttctctataaatacctttctgaagaaagagaaatcaagacgatccatatattcgttaaactgtcccattgttacaaagttatatgcaaaaataaaaagataatgtctattgaagaaatattttagtttaatagtttggctgggaagacaattatgcaaaaacaggacttcttataccactttcggacagctttgaaaacggctcttgattcttctttcatttgctggtgaaaatagaatcaacacgttttataaaccattaaaaattaaatgtatggaagtagtaaccatcgaaaaaagaacattctcgtatgtttgcgagaggttcacggagtttgccaaacgaatagaaagtttgtgcagcactcatacccagaaagtagaaaactggctggatagtcaggaagtatgcctgttgctaggctttagcaagcgaacgctgcaatattaccgaagtagtggacggctggcttattctcaaattgggagcaaaatttattataaatcttccgatattgaaagaattattgcggacagtgaaacacaaaatcaatcactcaaacaaactatgccttatgaaaagaactaaagaagattatccgtcctttaatctgttttccattgtcggcacatgggaaagcgttaatctgaatcctacggttattatctaccgtaatgataaagagtatcttctttctattatatatgtatcggaaaccactaaacaggcttctcccgctacttatgagatacagcaagatggtagccagtattttattaccgctgcatccaaacggctctatatagattatgatccgggaaaagatgtacttagcatttcatcgctgggtgactatctgcgcaactaactaggtatctagcaatcttgaaatcaatatttcaataaaacaatctttcaatcatggaattaataaataaagatacaccgcaagtcaaagaatttatttcttcgctcgattcaatgctgaatggcattgagtctattgtcaagcattacaaaccccacctgaacggggaacgctttctttctaacaatgaggtttccaagaaactgaatgttagtctgcgaaccctgcaagagtggcgagatacaggactaatcccctttatccagataaaaggtaaaatcatctatcgccaaagtgatattgataaactacttcaaaaacactattttgaaagctggaaggaataatctgccaccctcgaaaatattgtttttcggaatttaatttgaatcattgacttttacagtgaagtatttagtctgtgcaagtctttagataaaaatacgctcgaaatgcaatgagaggaagattttcatctaaaccgaaggctcggacttgaacaggctaaatacggaacttacctttgtcaatgcttcatattgagttctggaaaacttactttagaagaaaaggattgagaaaatgaaattcattcttcccaatcctttttctatattggctactgccttatttatatagccaattccgacaagcaactattcactttctgcatatccttcaaaatattctgatccagtacccgtgcatagtgttttgttacgctggtatctgcatgacctaacatcttggctacgttctccatacttacgccattcgctaggcaaatgcttgtggcataggagtgtcgggctgaatgtgtgcacaaatttttctgtaatccgcatacatctgcaatctctttcaggtagctgttcatgcgttgattgctcaatactggcaatagttttccggtacattctgccacatttttatacttttccagtatagaagctgccacaggtagtacaggaatgttacacatgatttttgtcttttggcggttctttcttatccaaagttcccctttgttatctcttactaagtgttcaggtgatagttctttcacatcgctgaaagccaagcctgtaaaaatgcaaaaaacaaaaatatcccgcacctgctctactcgcttaatagtgaactctttggcaagaatgattttaatctcgtccattgtgagaaattcaggatcagtttcttccaacttaaagcgatagtaagcgaatggatctttcttaatccagtcgttttccaaagcaatgcggataatctttttcaagttcttcaatcgggtaatagcagagttctgcgcacaacctttttcaatcttcaagaaagcgtcaaatttagaaatgaaattcgcttctaagttattcaaggcaatatccgataattgatattccttcttgataaattcctctaaatatcgggtagtggtttcataccgctgcacggtcttactaacaaagtctttgccgatcagtttgcggctttgctcgttatgctccctgaatacctgcaatagtgttttgttatcttcgtctacaccataaaacaactttcttaccagatcgacattgataaccttgtcggaagtttccagttctctataaatttggtgtatgcgtgaacgtgtgatttctaagtaatggttcagttccaccgacatacggtctttaccttttgaattctcttttgcttgattccacaagtttacagggcagcttcttttgatagaaatatctactatacagccgtttacggtaattctcatgcacacgggtgcttcaccgttctttaataatttgcctttcttgatgaagaacaatacagaaaatgattttctagccattttacatcgtttttagagttacaaaactatgtattctcttccaaagtagtgctacgcaaaacgttatgaatcagcgagaaagatgcaaattcgtgggactttttccgattaaattttagtcccacgatttatccaccgataatatgcttgaaacggctattttctgctacctgccagaaaaaagaaatccccgataattcttgattatcagggatttgcttgatttttcttttgttttcagtgatccgcttggggctcgaacccaagaccccaacattaaaagtgttgtgctctacctgctgagctagcgaatcaaacctttattgctgttaagcgggtgcaaagataggcacttttatttaatttgcaaggaatatgaggaaaaaagtttgcattatttttcttctataccctctattggctgatcttcagtggtttctgtcttataaatattttcttgattaatgatgtatcgctgataataggagagcatcagagtggtaagcggcaaagctataatcatacccagcattcccattaacgatccccaaatggatagggagagcagaataatagccggattcagaccggtaatctttcccatgatacggggaacgagatagccatcttgtatgatttgtaccactataaatacagcagtagccgaagctatgatgatccagaaattatcaccggtatccgcagctttcagaatggcaagcatgatggtggggacaaaaccgatgatttgtaggtaaggcaccatattcagtgcaccgatgaataatcccaaaccaatggccagcgggaaatcaataatcagaaagccgatactgaatagaatgcctacgcacaaagctactagtgcctgtccgcggaaatatctgttcatgccgtcttttacatcattcaatatgccggttactgttttccggtatttctttggcatcaggtgtgcccagccttcggaaatactttcgtaatcgagcagaataaacactatatataataggataaggaagacggtgaagaacccgaataagaggttgatagactccgatataagcgaccatagtttaggaacggttactttaagggcatccaatatattctcctggctgaacatttgctctaagatgtgcaggtcgatattctgccggataaattcggagagggtagtggggacattgcttgctgtatgagtggtgctgaagtactctatcaataaatcctttacccgcaggaattcctgaatcatgggcggcacaagcagatagaatgcaacgcttcctataacgctgagagtaaacaaggcacaaaagatagatattattctgttttttagccgtagcttatgctggaagaagcttaccaacggatatatcagataagcaataagccaggcaaggaagaacggaagcaatacgccgctcaatcgcttcaggagcattaataccccaatgatgatagcaccgagaatgacagcacggataaaactgtcgaatgtaattttcttacgctccataaggcttttgctttttatttatagtttatccaccggcggcagtccgatctccctttattgcccgcagatagcattcccggcagaggggttcgtattcggccgtttctcccagaaggacttgtttgtcattcttgacagtgcgatgtgagaaggaggctaattgtccgcacttcacacaaatagcgtggactttggatacttcatcggcaatggcgcaaagtcccggcatagggccgaagggaagaccgcggaagtccatatccagacctgctacaataacacgtatgccattattggcaagttcattacatacatcaatcagaccattatcaaagaattgcgcttcgtcgatacctactacatcgatttctgaagtgaacagcaggatacttgccgatgaatcaatcggcgtagaagcaatggaatggctgtcgtgagatacaacctcttcttccgaatagcgtgtatcgatggcaggcttgaatatttctacgtgctgtttggcgaatttagcgcgtttcagacggcggatcagttcttctgtcttaccggagaacattgagccgcatataacttcgattcttcctctacgattggtttcctgtatatggtcttccgagaataataccattgttctaaaatgtttattttagccgcaaaaataacacttttaatggctttccgatattttttcattatttatttctacatttgcggcattaacatttgtgatgcgaaaggaaatgcagacattattggacgacatagaactggatattcaggaactgaaatatttaatgcaagttcttgcaacagacgccaaccctacattgaaggtagtagctaaacggaatatacagcagatgcgtgcacgactggatgctttgcagaaactgctggatgaaactcccgtagaggaagttgccattcctgaagctcctgtcgctccagtggttattcccgaaccggtcactgctcctgaaccggttaaaccgattcctgtagaaccggtcgttgttgaaatcaccaagccggtagagattgtatctcccaagcctgagtccacgcccaaacccgagcctgaaccgtccgcaataatatcttctgcatcgcctattttagcagaacggataaaaccggccactgatctgcggcatgctatcagtctgaatgactcattccgctttgcccgtgagatttttggcggtgatactgcccgtatgaatgaagtgatacgccaattgggggctgctccttcattggaaaaggcattggaactcttttcttctaccgttaatcctgatgaagaaaatgaaacggtggttgattttatagaacttcttaagaaatacttcagctaaagcaattacggatatgggaaaactttatgtagtgcctactccggtaggaaatttggaagatatgacattccgggctattcgtattctgaaagaggcggatttgattcttgccgaagatacgcgcacttccggaatcttactgaagcattttgaaataaagaatgcaatgcaatcccatcataagtttaatgaacataaaatggtggaaagtgttgttaatagaataaaggcaggtgaaactgttgcgttaatatcggacgcaggcacaccgggaatctctgatccgggctttctggtagtgcgtgagtgtgttcgcaacggtattgaagtacaatgtttgccgggggctacagctcttgtgccggctttggttgcttcgggcttgccaaatgaaaaattctgtttcgaaggttttcttccgcagaaaaaaggacgtatgacacgtctgaagatattggcagaggaacgccgtaccatggtgttttatgagtctccccaccgtctggtgaaagcgctgactcagtttgcagagcatttcggtgcggaacgtcaggcatctgtatcccgggagatctcgaagatacacgaagaaacggtgcgtggcactctgactgaattgattgagcatttcacagccaatgacccgcgtggagaaatagtaatagtagtagcaggaatagacgattaaataacttcattaaccaacgtaaaacaaaagcgtatgaaaaagttagcagttttaattgtatgtgcggccgttatggcatcgtgcgacggcttgtcaggtggaagtaaagaccaactgaaagctgaaaatgattctcttttgatggaacttactcagcgtaatgctgaactggatgaaatgatgggtactttcaatgatatctctgaaggcttccgccaaatcaatgccgccgaaagccgcgtagacttgcagcgtggtgcggtttcagaaggttctttatcagctaagcagcaaatagccactgatattgaatttatccagaaacaaatgcaggaaaacaaagagcagatcgctaaactggaagctatgctgaaaagtagcaagaataactctacccagttgaagaaagctgtagaatctctgacccaggaattggtagctaaaacccagcgtatcgaggaattgcaggctgaacttgcctccaagaatattcgtattcaggaattggatgcagctgtgactggcctgtcaactgacaaagaagtgcttactgccgaaaatgaagcaaaggccaaaaccgtagctgagcaggataaggcactgaacactgcttggtttgttttcggaacaaagaaagaactgaaggatcagaatattctgacaaataccggtctcttccagaaaaagcaagtgcttaaggatagtgatatcaataaggattactttactcaggttgatattcgtacaacgaaagaaattaagttgtactccaagagtgcagatgtcttgaccactcatccggcaggttcttatgctttggagaaagatgataaagatcagctcgttctgaagattacgaatccgaaagatttctggagcgtatccagatacctggttatccaagtaaaataacttaattgaattataagaatggcagggaagggttatccctgccattttctttttatatgcagtacaagaatatttttttcgacctggacgatactctctgggccttttcttttaatgcccgtgatacatttgaggaaatgtatcgcaaatatgaatatgatcgctattttcggtcttttgaacatttctatgaactctatgagaagcgtaatatcgaattgtgggcagaatatgcagatggaaaagtgacaaaggaagaattgaatcgtcaacgttttctctatccgctggaggcagtaggagagggggatgcggctttagcgaaagctttttctgatgacttctttgcggttattcctacaaaaagcagattaatgccccatgcgcaggaagtgctggaatatttggcacctaaatataatctttatatcctctccaatggatttcaggaactgcaatgccacaaaatgcgttctgccggaattgaccattatttcaagaaagtagttctatcagatgatattggtatcttgaagccatggcccgagattttccattttgccatgtcggctacccagtctgaactacgtgaatcgttgatggtgggtgatagctgggaaaatgatataacgggtgctcagggagtaggcatgcatcaggtgttctataatgtaacgggacgtaccgagtttccatttaagcctacttatcagattacagatttgaaagagttgctccaattgttgtgacattgagggattagttgtaattttgtcagcgtaaacacataatttgcagctatggatactattttacctttcgctttgctttgtttcacttctttctttacgttgacaaatcctctcgggactatgcccgtctttctgaccatgacccatggaatgacggataaggagcgacagtctgtagtgtctcgtgctacattagtggctttcatcacgattatggtctttacctttgcaggtcagttcctgttcaagttctttgggatctctacaaacggttttcgtatagcaggtggtgttattatctttaaaatcggttttgatatgttgcaagcacgttatacacaaatgaaattgaaagatgaagagattaaaacttatgccgatgacatctccgtcacccctttagggattccgatgctttgcggtcccggtgccatagcaaacgccattgtgttgatgcaggatgcccatactatccaaatgaaaggcgtactgattggtatgatcgcctttatctacttgattacatttttcatcttgcgtgcctctacgcgactggtaaaagttttaggggaaacgggaaataatgtgatgatgcgcctgatgggacttattctgatggtaattgctgtggagtgttttgtgagtggggcaaagccgatattggtggatattttgaaagaaggcctgatataaaaatacccccaaatgtcaggttggacattcggaggtatttaaaatgttcagttatcgtatgattatcaccatggataatttacgttccagataaatgctacggtctgataccaacccagactaacgttgcttccaccttcatcataacctaccaaggcgttgattatatagaggttgtcatcgttttcgaatgcacagttgttcttacccggtgtgtaggcaaagtaatagttgccatcgtctgcactcgcttcacccattttctgaaccgtagttgggaatccgacaggtgctccattagcggcattaacggtgaactgtatgtggtgtcccttttccaaagtcactcctgttgcaccggctgctgtttctgaataatagtagggacttactagtcggtacaaaccattaccaccttctgccttttctatatccactttcacaccgtcacctaccaaaccgttatcgtcgatggttcctgaccatgaagtatagaactgagcgctaccggctgctacccaattgtacaatttgcttaaattaatagttgtggtagaattgcctgatacagaggtgttatcctttgctatggaaagagtcgctttataagaaacacctacttgaatgtcacctactgcaatcgtataaatggcggtattactaccatctgcaaatgttacctcagccggtccgctcaatgcaggatcgttaaattttgcatctacggcaatggttgatgcacctacattggtattgcgtgtcagagaaaccttgatttcagtcaacgtttcagtacctgctacggtataggtttgttcgctctggtcgaacgtatatttcacttcgctgtctatcggggctttgtcccaataaccatcggtactacagccgacaaacatgacagccgctaccgacagcgctatggatagaattgatttattgaaattcatataatgctattttttcagtttgttacctatgttcattagttgtctgtaaccggagacggaattgatgttaccggattattgtctgatgccgagatcaatgagttaccttgttcttcactttcagggatacggtaaatcaaggtgttatcaccagccggcacgttaaatacataagcggcagggaatcctgctccacgacggtcgatacctttgttcagtcgcagaatatcaaaataagaaaggccctcaccccaaagttcaatacggcgttgctgccatactgcatcctgtacggctgttgcactggaagcggtacaaacataggcagggtcacgatagtcatttacaaacttttgtaaagtagctgcgccggttgaaggatttccacccatagcttgtgcttctgccaaaatcaagtacatttcttccacacgcatcagaggaatgtcacttgcgttagtgctttgagccattactcctttataaggaccgtatttcatttgggtataagcggggcaaccatatttcgtagcttgggctacttgtgttgcattcaaattgtctgagtgcttattggcatcgagccaccatcctttacgaacgtctgtatcaggaatctcgttatacaacttcttgttgatcatacgccatgctcctactgaagcatatccataattcagtgatcccatatgtgaagggaaattcacaataccggaagttactacacggtctgtttcagcgattacaatggcccacatccaagagtggtcactgctttccgtaaagcccggagcacctgcttcttcgcggctataaggtgtaccgctaccgttgatggctttttgagcgtcttcagctgccgcagtccaattttgcatggtcagattgacacgtgcacgtaaaccataagccacttccttgctgatatagcgcttatcggtaccgcgggttttgtcagtagcttctaataaagatacagctttgttcaggtcactcatgatctgatcgtaaacttcttgcacggtagaccgggcgcaaccattagcagcagcctcattggcattttcgtttgtaatcagaggaacgcaaggcttgctttcattccctttataagtatgctgatacatctgggccaatacgaaataatcgaatgcacgtatagacaaagcttgtgccaggtagtactttagagagctatcttccgtagccgggtcgatggtactcactactccattagcagtatagatctggttgtacatcgtacgccataatatgtttgtcgggcgatagttaaagaaaagatcctcaaaagtcatagaacgggtaaaccagttatagtttatatctaaaccaaccatatccgtgccgcggctgtccaagttcagcataattgaaccataaccgaagtcgtcgtgtccaaaagaagtggggatggcattgccatatacactgaacatcgcagtgatacccgttacacttgccgataccatttctgggtcgtttttaacaacttcttctttctggtcgcttgtaacaacagcacccagtggttcggtatccaaatcattacaccccacaagcaatacacttgcaagtgccgatgcgaatattttaaattttatatctttcattgttattctgctttatagttagtatagtttagaacgttaatttcactcctgccgaaatactgcgtaatgcaccatacgtagaggtggtagatgatacataaccttgacgtggatctaatcccttacgtgcagcaaacaaggcaacgttgtcggcagcaccataaactctaagtgattctattcccaagttgcgtacgattcttttcggcaatgtataacctaaagtaatattgttaatagacaagtagttggaagaaacaatccagcggtcggaacttgaacctgcatcatagttttcggttgcacacaaacgaggaacatctgtattcgggttctctgccgtccaagctttggcaatgtccttatgccagttgtaaccggcattgctgttgctgccaccatgcatcaagtcttgataagtataatcccacagtttaccacccagctgataagagaactggatagaaaaatcaaaaccatagaaatccaagctagtaccaaaaccaccataaacggtcggaagcaaatcaccggtagcctctttgcaattagaagcgacagcatagtctgctgttgtataggcgtttccttcatcatctttcgcccagaacaaagattgtccggtagtggggtcaacacctgcatatttcactagataaagttggtacatagattcaccttcgcgataaatacgtgaaccactgattaattcaccattcaaatcaggatgcagcttatttactttatttttcaggaaagtagcattcccaaaaatgttccacttcaaattattgatatcaatcggagtataattcaattcaatttctacacccgagttagtcatcgaaccaatgttcattggaatagaactgtaaccgttggagtttgctaccggcttattataaagcatgtcgctagtcttacggttgaaatattctattgtaccttctaatttatggttgagcagtgtgaagtcagtacctatattgaaagagttacttttttcccaagtgatgtctggattgcctttataataaagtgtaccatccgagaatataccattagcaccggtcatggagtattgatccagatacggatagtagtttgcataaccgtttctcagcaatgcatcgttaccttgctgaccaaacgaagcctttagcttcaacatatcaatccattctgtattttccaaaaatgcttctttgctgataacccatgcgacactggccgaccagaagttaccccaacgcttgtcaggatggaaacgagaagaagcgtcgcgacggtaagaagcactggcaaagtatttttcatcaaagtcgtaattgattcgactgataatacctctggtagaatattcgtcacgagcaccaccaccacgtttgttatcgatagtgttgtttaccgtgaagtcataatccttataaagattctgcccggttgcataactatattcatagcggtagtcatagctctcataacctaacagaacatcgaaattgttcatgccgaagcttttcttataggtagccaggtattgctggttgaaggcggatgtacgtatgtgttcttgttgtgcagtaccaccgtaacttgcagactgtccataatacttgttacccaaaacattataacgtgtattatcaatataggcacctaatgaacctgttagtttcagtccttcaataggggacaactcgatgaaccatttaccgttaaggatatccatcaggtattcttccttattataaagcaagtcacccttgggatttgacatggacataaagttacgcgtgctgtttgtactgctaccatcaccataatcataaatcttgttacctgaattcttgtcgtaagccagtgaaccatcagcgttacgtacatacatcggataaactggagcaatattatttgccagcaagaaagcgtttcctgaagaagcagtagctgtttggtcgcccggatacttgctcttggagttagtatatcctaaactggtgccgaatttcagccacttttttgcttggtagtctacattcaaacgcgtagaaatacgattgaaacctgaattttcgataacaccgttatcttccaggtaaccggcagagaaatagtagttcaaacgatctgtaccacctgatacgctcaagttatactcttgacgcatttgactggagatcgttccatctgtccaatcatccggagtatagtaatattgtccgtcactatagcccaacttcgcatttggattgattttaccatccataccgataagcccctcaccttgaggtaatgtatatatttggtaaccgattgccgggaacaactgtgtattagcataagtgtgcgctgcttctggggtacgtcccaatttgtaataagcggcattgtaatgagccttatagagagtctccatgtacgtatcagggttttccatcacgtcgtatttgcctacttgacgggaattgctaccccaacgtgcatctacagatacacgtgcattaccgtccttaccttttttagtggtaaccaagataacaccgttagcaccacgcgcaccatacaaagcagctgcggcagcatctttcagtacagtcatagtttcaatatcctgtgaattgatagaagaaatatcaccatcaaaaggaattccatctactacatataacggattgctgctggatgccatagaaccaataccacgaatacgtactgtggctgaagttcctggttggccgttgctgcttgtagtttgtacaccggctacactacccgacaatgcgttggtaatgttggatacttggcgcttttctagtttatctgcctttacaacactcgcagatccggtaaatgcagacttcttcgcagtaccgtaagctaccactataacttcgtcaagcatctctgaatcaaccttcataaagaccttcatagtaggtttaatagccacttcttgtgtctgcataccaatgtacgaaacctgcaaagtcttcgcagaactaatgtggcgtttattttattaataatcaatcgattagtatatcttaaaggactaaatattatgtatttccaattttataattatttgtatataagcattttattcatacatgaattcattaaattctaccagtattatcccgtatttagaaaatattatattgaaactcagcaatataccgctttcatcaaggtataaatgagctatcaaacaattactgtgcgtttaattcactgcacgaatgtacaaaataataaataattgaaagttaattctgattagcgattcacgcatagaggcaaatataattaaaagtatatatttttcagcaaaaagacatcatttactttttgatgaaatatatttaaaagaacaagagacaagaaaaatagaaaagcgaaaaataaatagcataatttataaaaaaaagctacctcaaaataaaaatgaggtagccttattcatatcttttgtatcagatatactctgttacaaacttatttccccaataacaggagtagtaggaaacaattattccggtaattctaatgtttctgtaaagccactgtataaaattccatacccaccttctacagcaacagctccacgcattgcgaatagcaacttattgccttgacgttgcatgtcggtaggagtgaaatacaccattccgtaagtagcatgtttatatccagtagcttgtaagtcccaattaaccagagtttggccatcttcactcaatgtaaagaccatgggatatccttctgttatacaatccggcaacttgtatatattaccttctttagctttcaatataggctgttcccatgcctggccgaaaagttctgaagtatatatcccggttccgtaatcctcccatgtcaactttctctgagcggttacagttatttcaccggatttggaaggtgacaatgcatccttgtcatctatggtcagtacaatctcatatttgccagtagcgctcaagtcatctatagaaccgaaagctaattctgcgtatcccactgcttcgccttttgcaaaggctatattggaacttttcaaggtgaatacaccttcttctactgtagcttcatccatgctaatgccgactgaagcctctgcatctgtatttccacgatacacgggaacccggatgataccattgtcttcagcacctacttccacattcatttgagtagatgcaaaagctgcttcaactccgtttacaccatatttcgtaccttctgcatctgtatcgcaggaggtaaaagctgccaaacagagcaatatagcagcatatttctttattgtatatagtttcatattttccttcattatataggtttataaattattgaactataggattctgatccgcagaggtaatattctcattaccatctatttcagattgcggcagaggaaggataaataatggagaagcggcattagtgttctttgtcgttaccttctctgtatgattagagccttcataattgcgattataccccaaacctaaacgctgcatatcgaagatacgtcctacttcaccccaaagttcaacacgacgttggaataaaatctcatccattaatgtttccaaaggagcattagtgtcagaattataagtatttgcatctgtacgggcagctaaacgttcctcaaacttactatctctcgcatttcctaaagtttttattgtggtacgggcagcatcatattctttctgatgacattcggcttcagccttaattaatatcatctcttctgctctcataagtaagtaatcacctgtacgggttgtgtaatctgccattttaaacttaatttggcagtaactcgtataagatgacgctgtcttttcttcgtcagaaggaatggccccacggaaccacgctgttttacgctcatctgtaccagaaatcagtttatacaaccctgtgcttatgcattggcgtgctttagaagcatacatacccggtgcatcagcatccatatgcgagaagaagcttgcaaaaccactggactgatcggctataatttccattccccacaaaacatctgctgtttttacactattattcccgcccaattcggctatagtagcaactttcaacgaaggcttctttaaggcttcagcagcagccgtcgcagcacctgcataatcatgttgagtaaggcagatacgggctttaatgccattagctacatagtaatctatatgagatacatgcgtttgcactttattactgatacttcctaacagatcaatagctttttctatatcagaattgatttgagtataaactccctgaacggttccacgagggcttccctccgaaccggcaaccgttgcccctgtatacaaaggtacaccgggtgcatcctcatgtcctttatacgtttgttggtacaattgtatcagatagtaataggcaaaagcacgcatggcataggcctgccctacaacgctgtttttaagttccggatcgcctcccattgtgttttctgaagcaatgatataatttacattactaacgatagtataatagaagttccaaatagaataaggacgtccagctttatttgaatagtctccatgaacattcaaacgataatcttcataaaaccagccttgtccctgctctttcattaaatgatcttcagccatcagatctccaagcaattggatagctgtctgtccgcagttttctgagccccagtttgaactccaccctgctacatataacatacggtatacaccatttatagcagtttctgcgctacttgcatctgcaaatatcgtagaacctgataccttgtcagtcggttccgtattcaattcatcggcacatgagctgaatgcaagaaggccgattaaagaaaatatatataatacttttttcatcttttatattatttaatcaggtttagaaagtgatatcaattccgaatgaaattgttctgacaggtacgtaaccaaaatccgttcccccagtgaagttatattgagggttcatacctttcaggtgattgaacaacacaacattgtctgccgttgcagtcaggcgtgcagaatcaaatccgatagatttcatccactttgaaggcagagaatatcctaaagcaatatttttaatagcaaaataggaagcgtcaatcaaactgttatcagtaacaatgtaactctttccgatttcaatacgtgggatgtctgtgatatcgcccggatttctccatgcacgttccagcattttactctttgcctgtcctacataattgccatataataaagtattataaataccatccaatactttaccaccaatagaatatgtacaaaggatgctcaaatcaaatcctttatatttgaatgtattattaatggaaccatataaatcgggaatacggctaccctgaatttctttgcatgcagtagccttggccatatcattagttatatactttttgcccttaactccgttttcatcggtatcccatgcccaatacagttgttctccagttgcggggtcaacgccagcggcagttgcagtatagaatgaatataaagtctcaccttcgcgaatgatataggatccggaaatgatttccggtttatctgccagctgcaaaaccttattcttaatcgtagagccaaggagcgttaagttccaggtaaacggagtatctttaaagatatcaactcccaatgtgaggtcaatacctgtattgcgcatactaccaacgttcttgttgtagccatcaaaaccgagtgaagttgccattggaaatgacattaacatatctgtcgtcttacgttgataccattcgatagtagcagaaacacgatcaaacaattttgcttcaataccaatattcaggttcgcatttttctcccatttcaattctttattttccaaggaagttacggccgcaccgctcatcgacgagtttgcataacccaaatcataaaatgactgccaagcataaaaattctgtttggtaccattcaatatggcatcattaccctgtacaccatagctggcttttaatgacagattattaatccaagtaatgtcactcatgaaagattcgtgagagatacgccagttaccaccgactgaccagaatttaccccaacggttatccttatagaaacgagaagaaccatcggtacggaaactggcagaaaggtaatacttatcggcaaagtcataattcaaacgtgataacacagactgaactgcataattgttctgataagaagatgctcctgtaatcgttgtagctgcatccagttcataaagtccaccaaatgggaatcctgtcttggttgctgacaaataatcatatctgtatttataaaactcatgtccaaccaaagcttcaaaatgatgatcaccgaattttctatcgtatgtcaacaattgattgaaagtataactgaatgtacgtgcagtagctttttgtatagtaccttttacggctacagagttaccgttgtatggattataataagttgctccggctgaattgattaagtcaaagccataattaacagaaaatttcaatccttgcaggaatgtatttttcaaatcacctaattccgcatatacacgtccgctcaggttatcgctttgagtagaatacatatcatcatataaggtagcaattgtgttccactctgaactggcaccggccggtctgtttttaccatagtcaaaaacggcatttcccaaattgtcataaatcgtagcaccattggcatctttctcaaagacagggaaaataggagccattaattgtgcactgtaccaaacattggatgagccggatgaattttcaacagctgtattactctcattgcgagagtagttggcgctcattccggcttttaaccagtttgtaacttcagaatctatattcaaacgtccattataccgattgaattttgttgtctttaacagaccttcttcatcaagatagcctaaagaaaacatatatttggttttgtcgcttccaccactgaacgaagcaacatattcttgacgtaaaggattgctttttaaagcttcatccatccagtcttcactatatcttaatttggcatcactacgtacttttcctgtcacaggatcgatcagttctgtaatactataattaaaagggttatactgttcgttctggcctagcatagcagtggatccacttttcatagcctctaatgcggcaacacctgccaactccggagaaactccaccgttgataatctgattattcttatatgactggaagattgtttctaaataaccggcttcgtccatcgtttcataacgtggaatagcacgtgaggaaacaccccaatttgctttcaagttcacttttaccttaccggaattaccttttttggtagtaatcataatcacaccatttgcaccacgagaaccataaagagcaccagcagaagcgtctttaagaactgtcatcgtttcaatgtcattaggattgattgctgaaatgttaccatcatagggaacaccatccactacatacaacggtgattgtgatgaattgatagagccatagccacggactactacagaagagcctgatcccggctgtcctgaacctgaagtagtttgcacaccggcaaccataccgtccaatgctttcgtaacgtttgcaactggtctttctttcaacttctcagacttgataacttccgcagaaccagtaaaagactctttctttgtggtaccataggctatgaccattacttcatccagcatttcagtatccgacttcataataacctttacattcggttttattgtaacgtcctgtgcttgcataccaatatacgtaatctgaagcgttttcgcagaacttagtatgtgatattttattgataatcaatgagaaataaatgctagaagaacttttcatgagataattgcaatttgttaaatagctaattactagatatataataaatagttttgtaagcatgtatctactcaaatgatcctttatttatatatcaagattctgtttatcaatacattaacaggtaataaggctgagcgatgaattataattccaatactataggttcaaaaaaacatttatatgtatgaaatgcttgaagagtatattgggaacatatcggtaaattacatacataaaggaagtatattatatggtcttatttttttgatatatattaattctaaatatggatatattcatttacacagacaataaaataggataatcttccaagtaattcagaaagaatttttatatggaacaccttgttgaataaaagtcataaatgtcgtttactgctaacaagaagttaggagtttgggaacaagaagttaactccttgtcgacaaactcttaacttcttgtcgacaagaaatagatacattgtaatgctttgattattagcattattactaaagattattatctacttatttgtaattataactctcattttagattattctttaaatagtatttggggtatggaataggcatattatggcaacattgcatgtgatgcttcttaagttcctttatattactgtttaaatatgaaagacagataatacaagaaactgaaaaagaagagaaatagaacagaatctcaaatagatcagatacatgaagtcacaaaaaaggtgtaactcaattatccaatattcctaaagcttcatggcaaacgattacaccttaattcaacgagacttatttcccttttttacgatgagctaacgagtggtttttctccaaatcacttattattgtcatatccataacattagtgtatatttgcgtggttttcacactcttatgccctaaaagtttttgcacggttgtaatattaacaccattgtaaatcaataacgttgcattagtatgtcgtgctgtatgaaatgacacttttttagataacccggctaatcgggtaatgataatcaactctttattcacgttcgaattatctctcaaatgaaaaaaatcttgtagatttgcctgatacttattcaaaatctgaatcccctttccattgaataataaatataatggaagtcggacttctgtaccggttttgatagacttatagattaaccaggtctcctgatgcatttccacaatgttttccggcttcatatttacaaagtcggaatatctcatacctgcgtaacaacagaacagaaatgcatccaatgtcttctggtattttatatatcttccagtcaattgcaaagtttccattttttctaactcctccggcgccaagtgtgtatgtccattttctacggttttgatcttatatttcctgaaggcatatttttgtatatccatatactccttattgatagctacattgatatgtcgctttaaatgcttcatatgtttagctatggtgttagtatgataccctttcgattgcagaaaatattcaaatgaagatacaaactcaaaagttaaatcagagaatgtcacattctttttaaaatcttgcaatagcgcaagcgtagagagatgattgcgtttggtactttcttttaggttcgaagtcatgacctcgtgtttaaagaaaggtataaacgaagacttatcttcctgttcttgttgttcagaaagcatctctttcaatatctccaaagtgataggtttaccctgttgccagagctcaagttcgcgcttttctatcatggccataaactcataaatcaatcgatttaaggcatctgcattaggatggttttttactagtagttttttcgcatcccattgatccggtctcagatagactttagtagagaaatacttcttcttcctattcaagtaagcctctacctgtactaaagctacgcctcgtttattaaggctctttttccggttgtacactaaactgtaaataatcttgttcatctttagttgttttagttaatactatgaacaaataagacgaaataatgtgctatacaagaaataaagaagacttaatatctgtaaaagtacgctttacaaagtgttttttgttttgtatttcctttataaaaaaggtaaatctacgtaaaatgactttcaaattaattcttccaatgcacatttttaacacttttaatttaaaaggtgaggtacctattaaggaatgatagcctaagaggtgcttcagagtgatagtaatcagaatgtcatttaggttttttaagtgcaaaaaagctgctgttaagcataaaaacaagcatttggttaacaaattgatagatttacaaggttttttcaacaaaataattgttcgtttcagttttattaatatatttgcattttgttagagtaaagaaacaattaatgtaaagttaaactttaagagagaatttatgaaaagaaaattaatgctgttattggcctgtctttttgttggaataggcctagtaactgcccaaactcagacaatcacgggtgttgtgatttctgaagaagatgggcagccagttattggagcctctgtattggtaaaaggtactcaacttggtactattactggtgtagatggtgattttactttatcgaacgtaccaagttctgcgaaaacgcttcagatttcgtttattggtatgcagacacaggaggttgcagtcaaacctaatttgaaggttgtaatgagaggcaatgccgaagctttggacgaagttgtggtaattgcctacggtaccgctaaaaaagaatcattgacaggttctatttcggtagttgacaataaaaagatcgagaaacgtattacaaccagtgtgaccggtgcacttgaaggtgccgcaccgggcgtacaggtaaataatacctatggcgaaccgggacaagctcccgagattcgcatccgcggtttcggtacattggtgtcaggcgcttcaagtcctctgtatgtggtagatggagttccttttgatggaaacatggccgaactaaactctaacgatattgagagcatgtccatcttgaaagatgccgcctcagctgcattatatggtaaccgtgccgctaatggtgtagtcctcattacgaccaaaagtggacgtaataccaacaaaccaagcattacactacaggtaaatcagggtatatacaacagaggtatttccgagtatgaacgtctggatgcagaccgttggatggaagcaagttggatggccaagaaaaactctatgatgagcaataccgggatgtcagaaaacgaggcggccgcatatgctacgagccacctaatcagtgagtccatcggtagaaacatttataatgctgctgacgacaaactgttcgacaataacggaaagctgatagctactcgtctgactggttatgacgaccttgactggcaggatgccattgaacgtaacggacatcgccaagaatataacttgtcggctgctgcatccggacaaaaatataatgtatattcgtccgtaggctatttgaatgaaaaaggatatgtgaaggctaccggttatgaacgtttctcaggccgtatcaatactacttatactcccaacaaatggtttaagggaggtgtaaatcttacaggatcctggactaaacgcaattataatagtaatgccagcggtaatgcgtatgccaatccattttacatagcccgctatatggcgccggtatatcctgtttatttacacaatgctgatggcacatatcaattggacgctgcaggagacaaaatatatgataccacttctccttatctgagcaatcgccatatagcatatgaaatgttgttcaacaagcaggaaagcgtacgtaacgtattaggcggacaagcttttgccacaatctcattaccttatggagtgtcattgactgtaaaaggtgacctgaataacagtacttccaataataagaagtacgacaatccggaaataggtgacggtgctaccaacggtggtcgtttgaccagctatgcttaccagtacagaaccatgaccttgcaagaaatcgtaaattggagctaccagttcaataacgtacataatgttgaggttatggcagctcacgaaagctacagctgggaacgtaaatatacagcaggaatgaataccggcatggcagtagatggaaatcttactatgggtaactttctcaataactcttatttcgcaggaagtgatgatgaagacaaaacggaatcttatctggcacgtctgaaatacaactatgatgatcgctatttcttggaaggttcgttccgtcgtgacggttcttcacgtttccacaaagataaccgttggggtaatttctactccgtaggtgcaagttggaacatgaaacaggaatcttttttgcaagatgttgactggttagatgcattaaaactgcgtgcttcctacggtgaagtgggcaacaatatgggcgtcagcctttatggacatatggctctttatactatcgacaagaacggtggtgaagctgcgttggtaaaacagtcactttctgcaccggatattaaatgggaaacgactcagaccgtagacatcgctgtagaaggacgtctgtttaaccgcctgaacttccaaataggctacttcgacaagcgctctaaagatttactatttgaggttcgtctgccgctttcggctggctcttatccttgggttgctgatactgccccgatgaacctgacacaatacaagaatatcggtaccgtttccaaccgtggttgggaaatctctttgaatgctgacattatcaataataacgactggaaatggaaccttggcgtggacgctactttcttgaagaacaaaattgtgaaactgcctgacggaaaagatattctgcacggtatgcagaactattctgaagggcattccatctacgaatggtacacttaccacttcgaaggcgtggaccagatgactggtacttctctctatacactggatccggataagaaggctactgccgaagaagctggtgcattgactaccatcaatggtacagattatgccactgccacttcatacgccaaacgtgattgggcaggtagcgcacttcccacagtctatggatccatcagttcggcgctttcttggaggaattgggatttgaatatgttgttcacctattctttaggtggcaagacatatgatggcagttatgctagcctgatgggagtatccgaatcaggtgcttctggtaacgcttaccataaggatatcctaaattcttggaaagaagttcccaccggtatgacagaaacttccgccaaccgcatcaatccgaatggaactccgcgtgccgattttcataagtcatccgacttgaatgccgccagcgaccgttggttaaccagctcttcttatttggtattcaagaatttgaacctgtcttacagtctacctaagagttggctgaagaacatgggattggaagggttgtcgttgactgccggtgtagaaaacctttttacactaacctcacgcaagggactaaatccgcaatattcgtttaatggaggttcggatgatacgtatgtgacagcccgtgtatataatttcggtttgactgtaaaattctaaagatataaccatataattcgtattagaaatgaaaaaaatactcaataaattgttcacaggtagcctattggcatgtatggtgttagtgtcctcctgtgccggtgactatttggataccgctcctaccgattcaacgggagcatccgatgccgtagggaccacggcaaatgcaatgaaagcattgaacggtatagccaaaattatgactacacagcagtattattttggtcagggatttgcaggcgaaaataacatcatggctcattatgaaaactatccgagcgagaattacttatataatatgtatgcttccggatggtcacctattcataatcaagaattccatacacgcactaactctatttatgacgcatacgcatggtactactattatactatcattggtaatgcgaacactattcttgccaatattgataatgctgaaggacttcaaactgaaaaagattttgtcaaggcttcagcactgactttccgcgcatacgctttcgaaaagttagtgcactattactgttggcgatggcaggattccaataacggcgcttcacaaggactcgtgctccgtattgatgaatccactggcggacaaggctatgctactctggctgagacgtatgttcaaatctacaaagatttggatgaagcaattgccttgtataaccagagtggtatggaccgtgatgccgcacaagtatggatgccgaatgtaaatgttgctcatgcagtctatgctcgtgctgctataactaaacaagattacaccaaagctctgtccgaagccaaactcgcccgccaaaactatccgcttatgagtaacgctgaatatcaatccggtttctgcaatccgacgagtgagtggattttcggttgtttcggcggttcgcaagaaaataattggtattggagttatggtactcagtttgcttgtaacggatattatgcgagtgcaaacaatactggcgctggtgccatcgggcgtgagcttatcaaccgcatcccggacaatgatgcccgcaaagcgctgttcttgacggaagacaaattccccggctatgattttaatgatggctcagccatggatttgacttacggtattcttggactgggtaaaggcgaagaagctgacttgctttgggaagacgctgcagagtattgccagagaatggcggtaagtggacttgccgctccttatcaatctggctatatgtatttgggcggacagttgaaattctatgtatttgatactccgggggtaagctatctgcctttcattcgttcatcagaaatggtattgattgaagcggaagccaactacttcttgaacaatgaaccggatgcacaagctgctttaatagaattaaacgctacctctggacgtaatcctgaatacacttgcacgaaaaccggtgaagccctctggaacgaaatcatggattatcgtgaacttgaactttggggtgaaggttttgcctggagtgattacaaaagatggaatcgttctgtagtgcgtaaaggattcgctgatggaggtaatgcacatatttccattgcgaaaacgatcccagctgatggtgcaaacaaatggacttgggatgtacccttgaatgaaaccgattacaacgatgaattgaatcttgcaggaaaataattccatcagaacatattggcggaattaatttattaccataccgatatgaactataattccgtcaacaggttttactggacttataaataaagtgttttgttttagtggagggaatgttcaatgacattcccttcattgctgttttattatgaaattggttagttgaaaagcatcattcctgttaaaacggacattaaatgccttaataattgattctgtaatcaatacaccacttggatttaattatacagctcaagacgaggtaagtattataacttttccataagactctaataaaaagtgatgtatagaaaaaagaactataaattgcctccatcctgttagtaattagccttagttatgttctaaatcatcttgaagtaaacacaattttactattgtttataatttttcttctgacctttaggtaataagaaataatgtaggtacaggactttttgaagtggataataatgaagagataaggtttatcaataaatatccaggccagaatggaagattaccggttaataatgtacgcgttactgcttatcagatatctacttaatagcagctgaagctgcactgaaaaaatcaactcccaactagaataaagctgatttctatttgaataaaattcggaaacgtgcagtttctgaattaactttgaaaaaaagaagaaaggaactggtcatggaaagtcatcgcttctacgatgctatgcgactgggattaaccctaaaccgtgaaaaaacaccaggtgaaggcactgatcattacttaaattcaacggatttaatatctccgaactgaaatgattacagaataatattagctattccacaagcagaagttgatgttaaccctaatattcaaggacaacagaatctgggatacgaataaagtcttcttaaaataaagttgttttagatgaaatgcaccctaaaagttttatataaaacttttaggatgttttcttatatttattttctctaattaaacctgtaattcattattatataagagaataaatattgatttaatataggctaattgcaagttagaataaatgttctatttatcgtttttaccgatacacttgtttgttgtttgtgagaatgaaattgttcgtattaaactcaactgcatataatactcttttgttgaaaaatcaagactagatggtaatttattgatatgcatgcaatttaccaatctggtttgggtagaaaatttaagtatttcatacatttgaatttctacctgaacctatagtattggttttatcactcatttgcattcacaataaaatagtaacagattaataattaagtaattgaaaatcaaacaaaggagcttttaggtagatacaaatatatactcatattttgtatatatctagttaccagatgtttaataaattataattatcttagtttgagttctgtaaatacatatttgtcattgattatcaacaatatataacctacttagttctgcgaaaacattgcaaatttcgtacattggaatgaaggcacaagaggttttgatcaagccaaatgtaaaggtagtcatgaaggcagataccgaaatactcgatgaagttgtcgttgttgcttatggtactgctacgaagaaatctttcacaggttcggctacggaaattaaaggagaaaagatatcactaaaaaacccaacagaactatctaaagctttaagtggtgaagttgctggtgttcaggtaatgtctacttctggtcaaccaggttcaaacgcaagtatccgtattcgtggtttaggctcggcatattcaagtcgcgctccactgtatgtagtagatggtatcccgtttgaagccgatttaagcggcatcgaccccagtgatatcgcttctatgacagtcttgaaagatgctactgctacagcactttatggttcgcgtgccgcaaatggggtagtcttgattacaactaaaaaaggtgaaaagggcaaaacacacgttgaggcagaaattaagtatggagccaatatgcgcttaatcccgcagtatgatgtaattgacagtcctgaacgatttacagagttaacttgggaaggtttgaaaaattatgcaggtaacagaggtggtatggatgccacacaatctgctgcatgggcatctaaaaatctttttcaggcacaatatggtattgctccaatctataatatgtggaacgcggatggtgcacagttgattgatcctgctaccgggcgttttaacagtggagttgcacgtaaatacactcctgaaaagtgggatgactatattttccgtacaggtcaaaaattggatgccagcgtaaaaatatctggtggtaatgaaaaactgactcattatactgcttttagttatttgaaagatgaaggctattatatttcttcagattatcagcgttttaatgttcgtaataatatgagtaatcaaattactccatggttgaaggctacaacatctttggcatacgcatatatggaaaccaataagcctggacaatcggatagtaatatgaacaacggctttcagtttattaatggtatgccttctttattccctgtatttgaacgtgatgaagatggtaatatcgtaaaagatacgaaaattggtggaaataaatttgattatggcatgaatgccggatatcagcgtcctttcgcttccggtatcaatccggcaggtgcattgttattagataaggatgaaattgtttcacatcaattcaatggaaatggatcttttgaagctaaattcctgaaatactttaaaataactgcaaatgttggcttacagtacttaggttcggcagagaatgaacttaccaatccttattatggtgatagtgccggtaaaggacagattgcaaaatatcagactaactacctgaatttcacagctaatcagatactttcctggggacagagctttgacaaacataattttgatgctttcgtagctcacgagtcaacatccagcaaaacatctgttgtttatggaagcaaatctaaaattgttagaccagataatacagaatggagtaatggtgtaattatggactatctggaatcatatacatatggatattccattgaaagttactttggccagcttcgttacgactacgataataaatatttccttcacggaacagttcgtgcggatggtagttctcgttttgccaaaggaaataaatggggtatatttggttcggtaggtgctgcctgggccattacaaatgaagacttcatgaaagatgtcaaatggttgaaaaacttgaaatacaagttgagttggggtgtattgggtaaccaagattttataacgagcccggttgttgccggttactatccttatgaagacctttatacaattgataacttaaatgatgaattcacattcagttttaaatttaaaggtaatcccgatttgacttgggaaagaagcactactattaataccggtatcgaatttaatattgccgatgtattggaaggtgaagtagaatacttccacaagaaaacaaccgatatgttgtttatgaagcaggttgctccttctttgggatatgcatcttatccggtaaatgacggagcattagtaaataaaggtgttgaattttcattgacagcacatttattaaataagaaggattataaatttgatttccgactgaatggaggttactataaaaatgagatgaccaaaatgcctatcgatgaaacaaccggtatggagaagcctatcgaaatcagtacatattatggttgggcaaaaggtcattcattatatgacttctatatccgcgaatatgcaggcgttgatccggaaaccggcttcgcattatataaccaatattataatgtaaaagctaatggtgaaagagagttgatcactgatatggaaacttataagtctaagaatacaattaataagctcgaagtagagcaaactagcgattgggataaagctaccaaaaaatttgtagataagtctggtatccctgcattgcaaggtggctttggattcgatttgtacgctaagggaattactcttaatgcaaccttctcttatggaattggtggttatggctacgattacaactatgcagcgataatgcacagtggtacatcaggttcatataattggcataaagatatagaaggtcgttggcagaaaccaggtgacataactaatattccaagtttatctaacgattatggtggtggcgctgatggtactaactatgctaatgcaagttctacccgcttcctgacaagccgttcatttttaaaccttgctaacgtgagaataggttattcattgcccaaaagtattgttgctaaactacatctttctgatttgaactttttcatttcaggtgacaacttattgtattggtcagcacgtaaagggtatgtttctatggcgtcttccggcaatagtgacaatgttaacgatgataacaaaaatgattccggcgaatcaggtagaagccaatatgctcctttaagtacaattatgggtggtattaaaattcaattctaacattaaaaataagaattatgaaattcaatataaaaatatatattccggtaataaccttagggctatcactactattgagtggttgtggtgattctttcttagaaaagagtccatcagattacattacttccggagatttacaggaagtagcgaaatggaactctaatatcttaatgggacaagctttgggtacatattccactacatttgctatgaattcaggtggtacgggtggccacgacgactttggacagaaatctgtagatattgcaacagacttgatgagtggagatatggttattatgtcccaagggtatggatggtttgaagctgcgggttcattaacttgcactactaccaccgctgttaattattcttatcaattttggaggtattattataagctcataaaagctactaatgaaatactggatgcagcaggtggtgatgaagtcactcccgaaggtgaagaaaaccagatatactatgcgcaggctaaagctctgagagctcattcatattttaacctagtgaacttatatgcaagaccttatgcggaagataaaacagctttggctattcccgtttatcgtacgcaattaacatcagaagctgtgaaaaaatcttcagtagaagatgtctatacattaatagtgaaagatttaaccgatgcaatccctttactcgaagggtttaaacgcccttcgggtgcaaaagaccaaatagatcaatcggtagcaaaaggtatgttagcatacgtttatttgactatgggtgattataagaatgccgctaaattatctcaagaggtaattgattctaaacaatataccttaatgaataagactgaaattattaattcagggtttgcatctgttagcattccaggatggatgtgggccattgatttgacaacaagtaattctccagctctccctactttctggggacacatggacttgttcacttatagttatgcctacgcaggtggagagaagttaattgatacggagttgtataactcaattccggcttcggatgctcgcaagaaatggtttagtgaatataattcaaaaggtgaacaatatgagctaaccaattggtggaaattctataactctaaacgaattatgggtaatcgcgaatggtatgatgatgaagtttatatgcgtgttgctgaaatgtacttgattaatgcagaagccaatgcacgcgaaaataacttaccggctgccagagtttcattgaaggcattgctggatgagcgtgatgctgacgccgcagcagcagtagctgtgatgaatcaggatgcattattagatatgatatacttcaactggcgtcttgaactgtgggctgaaggacgtgggctattaaccatgaaacgctataagaaatcaattacccgttgtgcagaagatgcaatgcttccaggtagtacttatagttatgatgacaaacgtttgatattcaatattccggaaagagagattactaataacccaaatttggctgagtaatcagtaaaataaagtgtttttagaaaaggggatttgtgaaaatctccttttcttgtatttaaaagtaaaggtattgatcattctttttgcttttcacgaatttgcagcattaagatagacctgtctacaacgatggacaccagtaattaccactacttccggacagtctaatgaccttgaattagcagagcgcatgattcctaaattattctgttcattcctttgttcctaaatgatttggtgcaatagacttttatttattatatattttttaagagcacattgcaaatacatggaagtttatattgaaaatagaaagaaatagaaaaataacaagtacagagattacattttatttatgctatcattaagcactttcaaaggtgaaatatccgtgttatatttgccgatacggactgttggataatgaaaaatccaaactatttgtgaaatatccgtgttaatatgaaaatttagtggaaccttgaccggaatattgattattatttacattacattatgaaattgaacgcatagtaattgttttttagttcatttatatcccatgtcaaatagtaatatactaataactaaagatttaactaactaatatagtataattccggtagatattaatacatattgctgtttattagcatgttatatatcaatgtattataaattattatcactcaaacacaagttcttacatcacgtatatatatctggaaattagatatatagcattcgcatagttctgcgaatacgttgcaaatctcgtatattggaatgcaggtgcaagaggtggctattgcgccacacgtgaaggttacaatgaaagcagatacagagatgttggatgaagtattagttgttgctttcggtacagcaaagaaatctgcctttacaggttcagcttcagttgttaatactgaggaattatcaaagcgtattacgaccaatgtatctgatgctttagttggttctgttgctggtttgcagatacgtggaggatcaggagcaccaggctcgggtgatggcaaaatcaatattcgtggtattgcttccatgtatgcaaatactgatccgctgattattgtagatggtgctccttatactgctaatttatccaatattccacaaaatgatatcgaatcaatctctgttttgaaggatgccgcatccgctgctctttatggcgcccgtggtgctgccggtgtcatcatcattactactaagaaaggtaagacgcaagaagccgtagtcaatgtggatataaagtggggtgtcaatacacgcggtgttcaagactatgatgttattacagacccgggacagtattatgaagcctactattctcaactttataactattcgcgctatagccagggattgaatgcagctgatgctaattcttgggctaatcagaaaatgattagcgatttgaagtacaatgtttatactgttcccgatggtcagatgctgattgggaccgatggacagttgaattccaatgccacattagggcgtaagtataactatcaaggtacagattattatttacgacctgatgactggaaagatttagcttataaaagcgctctacgtcaagaatacaacgtaagtgtaagcggtggttccgatcgttcctctttttacgccagccttggttatttgaatgaagatggcattattgaaaattcaggctacgatcgtgttagtgcacgtattaaggctgactatcaagctaagaaatggttgaaattgagtgcgaatgtaggttatattcactctaatcaagagtcaaatcccaatatgagtaccaccggaaataatacaaatttaatgtactacaccagtagtattgcacctatttatcctgcgtttgtacgtgtggtagatgcagcgggcaatgttatcgtgaaaaaagaccaatacggccatgatggctatgattatggaataaatgactatggtggtttaggtacccgtccatttatgtccaatggtaacccactgggtgctaacttatataaccaagttaaatctattggtgaccagctgaatggtacttttatggcagatgtaaatattaccagtttcttaaaagcaaatgcaacaagtaccgttatcttgggacagaccaactattcagattatcagaatccattttatggccctgctgcaggtactaatggcagaatccagaagactggcaccaccggatttagaaccaataatgttcaaaccttgacttattttcaagactttggcagacataatgtaaatgtaatggtggggcatgaatattatagagctacgactaaatatctggcagctacggcaaaaggtggattttctcctgatattccggaaatcaatgcttttgcaacgaagaatgatgccagttcttatactacagtatacaatgtagaaggttactttggtaacgctcaatataactatgctgaaaaatattttgtatcagcatcttatcgccgtgacgcttcttcgtattttgcaaaagaacatcgctggggtaatttctggtcagtaggtgccgcatggagaatttcccaagaaaattttatggaaaattactcttcttggttggatgaactgaaactgaaagcatccataggccagcaaggtaatgacaatattggtagttgggcatacactgatatgtatacactgactgcaacaaatgaaacgaccatgtcgcccacattttggcgtattggtaatccggacatcacttgggaaacgactacgaatatcaatgtcggtgtggaatttagtttatggaaaggtcggttggctggtaatgtagacttttatactaaaaagaccagtaacttgttgttttggctatctgttcctgaatcagcaggttcacgcggttactatggtaatttgggggatattcgcaatatgggtgtagaactcgccttaactgggactatcgtgcgtacaagagatatagattggagtgtatcagcaaatctatcgcataacaaggctaaaatactcactttacccgaatcgaagactataggaaatggaggttttgcggaaacaaactctactgatattgctcaaaactggtatgaggaaggtggtccactttacaacgcattctgtgctgaatatgctggtgttaatgaaaaaggagaggccacctattgggtggacgaaaatttgaaaggttctaccagcagacctggtaaagagcattcttacactactactaaccccaatgaagctactaaatatgcgcaaggcaatgttctgcctaaactatacggtggattcagcacttcattgcgagtactcgactttgatttctctgcttcattcgattatcaaataggaggcaaggttactgataatcgttacgcctctttgatgactcctaatgaaacctctgccagtgcaggctccaacttccataaagattatctcaaagcatggagtcctaataatacttcaagcgatattccccgctggcagtatggcgacaagtacacagtgttctccaattctgatcgtttcctcaccaatgccagttatctgaatttccagtcgttcacagtgggttatacacttccaaaaaatcttctgaggaatatagccaaaatacgcatctatgctgccggtgagaatctatgcttctggtctgcacgcaaaggtttcgacccccgctattcttatgaaggaaacaaagacataacagcatactctcctgtacgcaatatttcaggaggtattcaaataacattctaaacaaataagtgaaattgaatatgaaaaaaatattgattccattcttaactgttgcattcggacttactcttgcaacaagttgtattgaagagattgatccgcaatcatccaccataaccaaggatcaggcagccaatgctcctggttcgtatgataactttgtgagcggcataacttcttcgttggccggtacatttcaatttggcgctggcgcagataaaagatatccttatgattacggttatccctctttttatcagatgcgtgatgtaatggggcaagaccttgttcccagcttctcaggacaccaatattctacttggtacagttgtggtgtggctcttggcccccaatatcttctatgtcagtttccatggacatattattatagttggattaagaattgcaataccgttctttcattagctggagagaaccccgatacagataaaatgtcaggtgcaggtatcgcatatgccatgcgggcaatgttctacatggatttagcgcgtatgtttgctaataaaacttatgcattagacaaaaatgcagaaacggttcctatcgtaaccgaggctactgctctttctgacttagctactaaccctcgtgctactaatgaaaatatgtgggcatttattctttccgatctcgacaaggcagagcagtatttagcagattaccagcgacctgataaattgactcctgataagtcagtagtatatggtttgaaagcacgtgcttatttagtgatggaagactgggaaaatgccgaaaaatatgccaaacttgctcaagctggttaccaactcatgggtgaagctgattatactgacagcgatacaggcttcaacactcccaattcttcttggatgttcgggctgaaatttaaagatactgatgacaatattctgttgaatgatgctgatagttcgtgggggtcttttatgtgtcttgaagtgaatgggtcgggatgtggctatgcttccagctatggtcaccaatttctgatcgatcgtcacttgtatgagactatcccggaaacagatttccgcagaaagtgttttgttgactttcagatagctgaattaccccaaaatgaacaattagaggctttggaggcatatacaaagtatccggaatggatttatgcttccggtaataaagaaggcaaaggtgtaggcggtctttctctgaaattccgtccagccaagggtggaaatgataatcagtatttaggctttcttgtatccgtccccatgatgcgtgttgaagaaatgtatctgattgaggctgaagctgccggtatgcaggatgaatcaagaggcattgccttattgacgacatttgccaagagccgagatacctcttacacatatggtaaacacaatgagtcttacggaaatccagccaactctgcattccaaaatgaagtgtggtggcagcgtcgtatagagctttggggagaaggatttgccacttttgatatcaaacgtcttaataaaggtgtcatccgtagttatcctaataccaatcatgtggagaaattccgttggaatagtactactcctcccgattggatgaacctctgtattgtgcagagtgaaactaattataatacagcttgtacaaacaatcctacacctattgcacctactacggattctgatgagtatatgtggtaatccgggcttataatattaaaaaataagaatatgaaaaaatatatctatagtttatttatgatgattcttgctgttggaggcatgatatcatgttcagaagaagagggaacaaatccgggtaatgactctaggcctaatgttgttgtgtaccagtttgcaccggaggctccttacaatgcggacaatgatttattgctccgaatagctgccaacagcaaggttgccgaagcttattatctggccgaagcaacaaccgataaagaggcacatatagcttcgatgggtaaagacggttatatggactatgtaattaaaaacggtactaaaattgaaggtctttcgggggcgtcggatagcgatgtgacagtgaccggcatggtaggggaatatattattacggtagtagctgtgaatggcaatgataagatggcgaccgaaacaactttcacagggctgaagtgggagtcaattggtataggtatgttatcaagctcattcttcggtggtgaaggagaatgcgagttctataaagcaagcccagtacttaaatataaggccataggaccttttgaagagggctatgatattgtttttgatgttgctgataataatagtgtaactgtagctcaacaagctgtttatagctcttatggaagttatggaacgctttatgtttcgggcaatggagcacttcaaagcaataagattactgttaatcttacatttagagtgtctgccggtgtttttggcgccttcacagaaacttttattctccctgtaacagaaccttaaacaaggtagtattattggctattctgtaaaacaaatgccagttttattttaaaaggcaatgaaattccagctattgatttaactggatgttttaaataaagtgttttaaagatcgttcactgggaagtgagcggtcttttttagttcgcccagcacgaacgtgttctgacggctgcaagtccttagcgctccctaacaacaggaagcgtccagccgacgacaatggtgtccctcgtgagatagaatctgaaggcaatgcattgatgattgcattatctataaaatgtattttttttgacaaccgatttatttctttaccgaccaatcaaatctcataacctgagaaagtaaataggtactttcaatatattcaaggtaattcttaactgtatcaggatgtttaatttccactattctggccaatgaattataagagaattgttttgttgcattgcttgccaggtaatatatcatttcaagcagttctctttcaccatttaacttgttccgagtaatctttccctgccaataatgctttgtatctcattgaagtagaatgtcttctgttcgccaaataactctataaaggcttcgtataaagtctggaaatcgttaactgtgaagttaactaacctctcatcatcgaagtttaaataaaagtcttgttcagtttgtcgagagcggatttgttgcaataatacggattttccacatcttcgaatgtcggaaataactagaatttcggggctttctaccaaatgctgataatatccctttctaccatctgagactggtttctttcttgctgatcaaatatgacatgcttcaacagttctttcataatagtcaatattaatcagatgcaaatatataatagttttcattataaataaatgatttgtatgcttcttattcattatcaatgaataagaagagctcattttattcacttgaaatagagagaacttcatatataacatcagcgatactatgaatacagaattagagtaaaaggaaatatattgagtactactaacaatgaataagatttaaatgctctaatatttgctttcttctctgtatgaatgctctttaatttatcgaaataaatcatatgtattttgttcatttgcatatactgattatgaaaaatcagaacgtgtagtaagattcagcatgtgtccgtgatttaaatataggactctattcgtttttttttataattttgtacacttgtatgttgtttagctcaatagtactggttttagaacttattttaattcaatatatgaatgataatatgcttataataagtagtatatatattatctgggataattttggtagaaactaatacatatttgtattttatacctatcttattatcaatagtatagtaacttattatcttctttcaaaaaaatccgccaataacaatacattattgaaaatcaatagaatacataacacttagttctgcgaagactttgcaggtttcgtacattggtatgcagacacaagaagtggctattaaacctactatgaaggtcacaatgaagtctgatgctgagatgcttgatgaagtaatggtggttgcttatggtacggcaaagaagtcccagtttacgggttctgcttctactattaaagctgataaaattgcagagcgccaggtttctaatatatcgaatgccctttcaggacaggtagccggtgtacaaactacaagtggtaatggacagccgggtacaggttctactgtacgtattcgcggtgttggttctttgtctgcaagtaacaatccattgtatgtagtggatggtgttccttatgatggtgatatttcagctatcaactcacaggatattgagagtttgacggtattgaaggatgcagcttctaatgcattatatggtgcacgtggtgccaatggtgtaattttggtgactaccaaaaaaggagctacaggaaaagcaactgtaaatctggacgctaagtggggtactaaccgtcgcggtgtgtctaactatgatgttatgacttcttctcaggaatatgtggagaactactacacagcaatgttgaatggttatgctggtggagatcctaatagagtattgtctaatggaatgactggtaatcagtatattaactcattgctgttttctaaagacggtttgggatatcctgtttacacagtgcctaatggtgagggatatataggtgtagacggtaaacttaatccgaatgctaaacttggccgggtgtatggagattactatattactcctgatgactgggagaaagagttgcttgacaatggtaacttacgccaggaatataacgtaaatattagcggttctactgaaaaaatgaactattatatgtcagccggttatctggatgatagcggtcttatcccaggttcatcattttcacgcctttcattccgcctgaaagctgattatcaggtgaaggagtggttgaaagtaggtgcgaatgttgcctattctaatatcgtaagccgttatcctgatgaacaaactacttcaggaagttctaccaacttattctatataactaataacattgcgcctatctatcccttgtatatccgcaatgcagatggaagcattaagaaagacgctcgtggtttcactatgtatgactatggcaatggtatgtatacagatggtactacagctttaaaccgcccgtttctttctcaatctaacccggcatctgctttgcagttggataagaatgagtacaatatggacatcttgagtggacgtgctttcgtagaagtatccattatcgaaggattgaaagcgactgctaactggggtatggacctggataatacacgttatacagaattgatcaacccttactatggacagtatgcaggtaataccggtggtgtggtaggtgtttctcacagtcgtgtattcagtatcaatcaacagtatttattgacttataagaagaacttcggtgatcataacattgatttactggcaggttttgaatcttatgattataaaaatcagtctttgtccggtagcaagcagaaagtctacaatcctaatattgtagaattgaataatgcaattaatactccgagtgcaaactccagcacagctaattatgctacagcaggtttcttgttccgtgctcagtatgattatctggaaaaatactttgccagtgcttctttccgtcgtgacgcttcttcacgttttcatccggataaccgttggggtaacttctggtctgttggtctcggttggttgatgaacaaagagtcattcttgcagaatacatcttggattgatatgttgaagttcaaaatcagttatggtgcacagggtaatgataatatcggtaattactatgcctacctggatcaatatactgtttctaacagtaataatgattttgcattggctctttcttataaaggtaataaagatatcacttgggaaacttctcatagcttcaacacaggttttgattttgaattctttaaaggccgattgagcggtactgttgaatactttagccgtaagactactgatatgctttataacaaaccgatgaatgcttctgccggttatgccagtattccgatgaatgttggttctatgactaataaaggtgttgaattggatttgaacggaattttgattgatacgaatgatttgacctggcgcatgaattttaacttgactcatttcaagaatacgatcaatgaactggatccttcattgaatggtgagatgattagtggcagctacatttatcgtgaaggcgaatccagatatcaattctatctgcgtaaatatgctggtgtagatgagaacggagtagcacaatactataaggatattacagatgcggaaggcaatgtgaccggacaagaaaaaactacggatgctccgaatgctacccgttatgcaaccggtgatattctgccgaaggtatatggtggcttcggtacgagcctgaatgcgtatggatttgatttctctatctcttttgcttaccagttgggtggacgtatgtacgacaatggttatgcatctttgatgaattcaggtaccgatcccggtcagaactggcataaggacattctgaaggcttggactgctgataataaaggctctaatatacctcgtctgagtgcaacagaccagtatgctaactatttgtctgatcgtttcctgactaagtctgactatttgagcatcaacagtataacactgggatatacattgccaaagagctgggtacgttcattgaatattagttcactacgtgtttatatgtcagctgacaatgtagctttgttcagcaagcgcaaaggtttcgaccctcgtcagagctatacaactgccagtgcagacgtatattctcctatccgtgctatttcgggaggtttatcactttcattttaatctaaaacaaatatagaattatgaagattaacaaatatatattactgctttctgcaaccatggtggtggtttcttgtgatctcgataagtttcctgaaggaagcaccgtgacacaagaccagaaaaatgaggtggttgagttgctgccagaccgtatttcttctgaattgaatggtttgaaaacaggtctttattctcatacaaacctgttgattgattataataaccacatggactatggctttccggcagcttgtatgatttatgaaacagccggacaggatttgctgactttgaatgaccagaccggttataataagtttatcagttctcaacgcttattagacagaaacattacgtctacatttaatgcttttctgtggaagctatattataaacatatgaaaaccgctaatgatattcttaaagctattccggcagatgcggcagacgcttctttaaagaaatatcgtggtcaggcattggcttcacgtgcttttgattatttgcaacttattcagacttatcagttgacttacataggtcacgaaacagctaatggtgtacctctggtactggaaacaacttctgatactgagttgatgaataatccgcgtgcaagtgtacaacaagtatatggccgtattatggaagatttggatgaagctattactttgttgactggtgcttctgcacgtgccgataaagctgaaatatcagtagaagtggcctatggtctgcgtgctcgtgctaacttgctgatgggtaagtgggcggcagcggcttctgatgctgctaaagcttatggaacttctgctccttattctgttgcagatgtaagccaaccgactttctataatgctacagataatgcatggatatggggtatcgtagtgactacggaagattatctggcaaaaaccggtatcgtgaactggccttctaatctttgttcactgacgggtatgggatatacgacagcagctagtgctactgacgtagcttaccgtctcatcaacaagaatttatgggctaagataccagaaacggatgtacgtaaaggttggtgggtagatgaagatttgcactcgcctgttctggataacggacttggtgaagactatgcttactattgggcaaacggtatgtttaatggtggaacattccctagcaaattttctccttatacaaatgtgaagtttggtcctgacaatggaactttcgcagatacagacaatgcacaagactggccgttgatgcgtgttgaagagatgaagctgattgaagcagaagctcttggacgggataatctggctacaggtaagcagaaattggaagagttcgtaagacaatatcgtgatccgtcttatacctgtactgccggttctttggacgcatttatcgatgaagtttggttccagcgccgtattgagctttggggtgaaggttttgcattattcgacatcttgcgtttaaagaaacctattatccgccagggagctaactatcctatcaacagtacatttgctgagattgctgctgaggctcctatcatgatttaccgtattcctgaggctgaaacatctgtgaacagtgctattacagaggctgacaataatccggctgcaatggctccgactccggtgaactaataagcacattatcaaataggaaaagagaatggggtgtattcggatttacggatacacccctattttttatcaatttgcaaaatagtagcgggaaatatttgtggagtgtcagatttctgtaactttgcggtttcgttacttaataattatttaattattctaataaatgatgcctatgaagaaattactactcctgtctttggttcttttgtgtaacttatcggcatggacggcccaacgctctccggaagaagctctttctattgcacgaactttctttatgcggtcatccggggctgtaacccgtaatggcggtgaagtgcaattggtggcagtctctaatgatttgctaaaatctgcatctacccgtagtgtggaaggaacagccttttatatttataactatgcgcagtctgcttatgttatagtatccggtgatgaccgtatgaagccggtactgggctattcggacaatggaagtttcataactgaaagcttgccgataaatatacttgggtggttggaactgtataatgccgcttatgctcaactgggtaacgccgaaaaagcggttactgaacctaaactgcttactaaaacaagttttccggcatctgtatctcctttgctggagagtgtatgctgggatcaggatgcaccgtacaataatgcctgtcctctttatcaacaagagcgttgtgtgacgggatgtgtggctacggcaatggctatgattttgaaatatcatgaatatcctgtaaaaggaaaaggtacccattcttataaaacttccagtggaattgaatgttcttttgattatggaaatactacttttgactgggataacatgttgccgcaatatgaaggtaattatactacgacacaggctaatgccgttgcacagctaatgtctgcctgtggtattgccgttgatatggaatattcaccatctgcttcgggagcctattcatatcaggtaggtcaggctttaattgactactttggatatgatggtaatttgggcttggtatatcgtcaatattttacttcttccgaatggatgaacctgattaaatcagaaattaacgagaagcgtcctgtttactatttcggatcttcggatgatggaggtcatgcgtttgtttttgatgggtataatgaagaggatatggttcatgtcaattggggatggagtggaatgaataatggttactttgaagttgcttccttaaatccggattctcccggtattggtggtggaagcaatcttggaggtggctttacgagaggtcagggaatgtatttagggatacaaccgcctactactacttcaaactttacttctcatttttttatgacggagttagcagcaaataaagaggaagtcactaagggagacgtgtttaaactgacgattactgagatatttaatatgagtgtggcatgcaagaatagtaagttggcagtaatagcagaaaaagatggtcaacagtcaattttagggcagacggctttggctacgctgataaatacgtatgaaggatataatacttattctttttctaatctgaaaatacctaatgattttgctgatggaacttattccgtatatgtagctaccaaagatgagcgcgaagcaacatggagccgtgtgcgtagttacgtgggttctgaagcacaactcattcttgttgtaagcggtaataaatgtactttgactccgttcagtggtaatctaagtcttgaagaagacatggaggttagtgtgaaattagcccatagcttatatagtggtctcaaaggggatttcaaaatattggtttctaataaaagtacatcggatgagtattatggttcagtaggggttgcgctttttactgcagataaaaccccgagctttgttgcaatagtcggagatgcacaggtcgaaataaaaccaggcacagttaatagagaactggttgtatccggagacttggctattactaagaaccttgtgactactaatattcctgttggagattattatatttgcccctgcatagattggggaggaggtacgtatgctgtcggtgagtttactccggtcaccataaaggaggtgcgtggaaccgcagatttgaaagtgagccaatcacgtttggagaaggaacaacttcaagtaggtgagcccttgaaatttctggctgatctgtcattgtctggcgatggaaacgtatatactggaacattggtagcggcagtttatgaaaattccatgggttacccatacagtgtacattatcagaatgtatttgtggaggcagacctgacggaaaatcttgtgatggaaattcctctgagtctaggtgaaggaaggcatgctgttcgtttgtataaatcgggtaccaatggggaccttgtgacaattagcactctctttttttctgtaggaccggctaccggtattgaggatgaggtagccgataaggatggattagttatctatcagcagccagtagaagatattcttaatatccgtacttctcatgccgcccgagtgatttctgtctataacctgtccggacagcaaatgatacagcaaaaagagtccggggataagaaagagtattctattccggtaggagggttggatgcaggctattatattgtagtattgcaatcaactgatggtaagatataccggagcaaatttatgaaacgttagactatatatatatttatagtagtggaacgaggctattctattaacttaggatggccttgttttttctattctaatgaacgattttcactttaaaacgttcatttgcgataggatcatcaaaaaaaagtattcaaaatcatctgacgaaccatatatttcagtaattttgtctttctaatgaacaacaagatagtgatttgtatcattcgttgaggtgctactaaaacaattaacccctaactataatgaggtgtacactactctttctatttattcttcttgcaaatcggcttcttgctgataatgtaacagcagagcaagctcatgctttagctaccgatttctttaaaacgaatgttcaaacccgtagtactgctgcgtctccacagttacaattagtttgggatggggaagatgcgaatacccgtagtgcagggaatcttccggctttctatgtttttaatagtaccgaccagaaaggttttgttattattgccggagatgatgtggttatgcctgtactaggttattctttcacaaatagctttgtggtagatgggatgccttctaatctgaaaagttggatgaatgggctgaaagaacagattaacgaggcaagagagacgggactgaatacttctgatgttgtatatgaagcgtggagaggggtgtcggatatgacaaccggagatgtggtaaagcagtatcaaacggcggagtgggatcaagagagtccttataatacgctttgtcctaaaatagaaggcacccagactgttacagggtgtgtggcaacggctatatctatattgatgcgatatcatcaatgcccgaatgcaggaacgggtactcttccagcttatagttatgaggcgctagttagtggagctaaaattcaccaaaatgtatcggggagaactttgggacatacttatgcttggaacgatatgccacttcaatatgatcggaattcatccgagatttctaaaaatgaagttgcaactttgatgtacgactgtggtgttatggctcaatcacagtttaatatcgcttctgccggtggaaccggtgcctctacattgacagctgttcatggattggcagagtatatgaattacaataaaagcatgttgtgtcttcgtcgtgaatggtattcggatgcagagtggatacaaatgctggaaaatgaaataatgacagtaggccctgtgctttacggtggagctactcttagtaatgaaggacatcaattcatattggatggatatacaacggaggattattttagagtaaattgggggtggagtggctatagcaatggttatttcctgatttcagctttgaatccgaataatcagggagcaggtggtagtactggcggtggctttgtcgcgaatcaagacgctttgttcgggctaaagccggcggagggaaattcaagctatcaaacattattggccatgcttgctgggaaatctcaagatgggacttattattccggcttggaaacctctgaaactcaatttaatgtaaattcttcctttattgtgaagtgcggcttcctctggaatttgggattggactcgttctcgggaaaagtagctttggctatggttgataagaatctgaatataagagaatttatatcaagaatttcggatattccaagtatgcagacatattatacagtgtcctttgctccttcctgtagaatctcattgactccacaacccggtgatcgtattgttgcagtctacaaaggaacaaatgatgccgaatggaaagtggttcgtggtggtcctgataccacgaatgagattattgttaaggctgatcctacttcaattatagagacgaagcaagaaatacaatttactgctttctgtgataagcaacaggaaaccgtggttgctcatttgccggagaattcccacaggttgaatctatatgatgtaaacgggcgtctgttgaaacaaatattgtctgaaggaaaagaaactataactttctcttgccgggaatatcctacgggagtgtatcttttgcaggctgtaacggacaagggaatccatcaatgtaagtttttaaaatgaaaaagagaattaatattgtaatagcaaccttacttgtgctattggcgggttgtcgttctgcgaaaaaagaaacaatggtcatatctgatatgcaaaagatagaaatgaattctggagcaattactccacagttgacaggtggtaatccggcctccacttctccggtggtttatatctataaaaccaaggctgattattcacaccaggtaccggtgataatggatgaggctcgtacccgcattttgtcctatcctgcgcccggggatttgaaaatgggggatgggttacgtctgcctactcttttgaataagggatacttgctggataataagggaataggtcctaatgtggcttttcttacctatacgtatgaagagtatagccagttgcccacagcaccttccatgaccgatctgatgtcacatattcttgataagaatcctttactggaaattcgtgcatgcggtcgccgtgctgattataaagatattgttatagaattaaatgagaaaatagcagaaggatttctgcaaaaataattatatttgtcgcccaatatataataaataggtatagtaaatgaaagaatttgtaatctccgaagtacaggcagaaacggcggtattggttggtctcatcacgaaaacacaggatgagcgtaagacaaacgaatatctcgatgaactggaattcttggctgagacagccggggcggaagtagtgaaacgatttacccagaagctggaccaggcacattctgtgacctacgtcggcaaaggtaaactggaagaaattaaagaatatatccggaatgaagaggaagccgaacgggaaatcggtatggtgattttcgacgatgaactctccgcgaaacagatacgtaacattgaagctgagttgaagatcaagatattggatcgcacctcgcttattctcgatatttttgccatgcgtgcacagacagccaatgcaaagacgcaggtggaactggcacagtataaatacatgcttccccgtctgcaacgtttgtggacccacttggaacgccagggtggtggttctggtgccggtggcggtaaaggttcggtgggacttcgcggtccgggtgaaacgcagttggaaatggaccgtcgtattatcctgaaccgtatgtcattactgaaagaacgtctggcagagattgataagcagaagtcaactcagcgaaagaaccgtggacgtatgatacgtgcggcattagtgggatataccaatgtgggcaaatccacattgatgaacctgcttgccaagagcgaagtatttgcagaaaataaactgtttgcaacattggatactacagtgcgcaaggtgattattgataatctaccgttcctgctttcagatacggttggtttcatccgtaagttgcctactgacctggtggactctttcaagtcgacactggacgaagtgcgcgaggcagatctgctgttgcacattgtggatatttcacatccggattttgaagaacagatagaagtagtcaataaaacattggcggatatcggtgcatccggtaagccaatcatacttgtattcaataaaatagacgcttacacctatgtggagaaagcggctgacgaccttacccccagaacaaaggaaaacttgacactcgaggaactgatgaagacttggatggcaaagatggaggataattgcctctttatctctgcccgtgagaagatcaatttggaggaactgaagagtgtggtttatgcacgcgtgaaagaactgcatgtacagaaatacccttataacgattttctttatcagacctacgaagaagaggaagaataaactaaaatttgttggtcatgaattacagacatttaaccgaagacgaagtactccggttgaaaagccagtcgtgtctggcggatgattgggggaaagtaatggtagcagaagactttgttaccgagtttgtacatcacacccgtttctcgggagatgtacgtttaggcgtatttcaatcagagttcacattgccgggtggaattaaaaaacattccggtttgcgtcatgtaacactccacaatgtcacggtgggggataactgttgcattgagaacatccagaactacattgctaattatgagattgggcatgacacattcattgagaatgtagacatcatcctggtggacggattgagtaaattcggtaatggggtagaagtatccgtactgaatgaaaccggtgggcgtgaagtacttatcaatgataaactttctgcgcatcaggcttatatcctggcgctttaccgccaccgtccggaattgatttgccggatgaagtctataacagacttctactccaataagcatgcctcttcggtaggtactatcggcaatcatgtgatgatactcaatacaggttctatcaagaatgtacgtatcggagactattgtcacatctgcggaacttgtcgtctttataatggtagcattaatagtaatgcggaagcaccggtacaccttggtcatggagttatttgtgatgattttattatctcttccggttcacatatagacgatggagctatgctgagccgttgctttataggccaggcctgtcgtttgggacataattattctgcgtccgaatcgcttttcttcagcaattgccagggagagaatggcgaggcatgcgctatctttgccggaccgttcacggtgacgcatcataagtccactttactgattgccggtatgttttcattcatgaatgccggttcgggttccaaccagagtaatcacatgtataagttaggccctatccatcagggaacattggaacgtggtgctaaaactacttccgattcctatattctttggcccgcccgtgtaggcgctttttcattggtaatgggccgccatgtgaatcattccgatacttctaacttgcctttctcctatctgatagagcagaacaatactacttatcttgtaccgggtgtcaacctgcgaagtgtaggaaccatccgtgatgcgcagaagtggccgaagcgtgatggacgtacggattccaacaaactggatttcatcaattacaacttactcagtccctatactgtgcagaagatgttcaagggacgggaaactttgcagaacctgcgccatgcttcgggcgaactttccgatatctattctttccatagtgcgaagatccgtaactcggcattggtgaagggtatcaagttctatgagatcgccatccataaattccttggaaactctgtcatcaaacgtctggaaggtattgaattcaaaagtaatgaagaaatacgtgcccgcctgaagcccgacaccacagtgggtagcggtgagtgggtggacatttccggcctgatagctccgaagagcgagatagatgccctgatcaatgatatcgagtgtggaaaagtagaccgtctgaagtacatcaatgctgaatttgagaagatgcatcagaactactacacttatgagtggacttgggcttatgaaaagttggaggaatactacggaatcaaaccggacaatattacggctacagacatcatccgcattgtagagaagtggaaggaagcggtagttgggttggaccgtatggtgtatgatgatgccaagaaagaattctcgctggcttctatgacgggcttcggtgccgacggctcgcgcgcagagaaagaaatggactttgagcaggtacgcggtgactttgaaagtaatccgtttgtcactgccgtgctgaaacatattgaagataagacagcgttgggtgacgaattgataggtcgtatgcagagggtgtcatcattttcactctaattaaagaaatatttcaataatagttcttacctttgtgctacgattcattaatttaatttacgagtaattatggcaacaacacctccgttcaagtatcaacctatgtttgagcatggggaagataagactgagtattatctgcttacaaaagactatgtatccgtaagcgagtttgaaggaaagcccattctgaagattgaaaaagaaggtcttacagcaatggctaacacggctttccgcgatgtgtcatttatgttgcgccgttcgcacaatgagcaagttgctaagattttgcgcgaccccgaagcaagtgataatgataaatatgtagcactgaccttcctgcgcaatgcagaagtagcttcaaaaggcgtgcttcctttctgtcaggataccggtacggctatcgttcatggtgaaaagggacagcaggtatggactggctattgtgatgaagaagctctttcgttgggtgtctacaaaacatatactgaagaaaacctgcgttactctcagaatgctccgttgaatatgtacgacgaggtgaacacgaagtgtaacctgcctgcgcaaatagatatcgaagctaccgaaggtatggaatataagttcctttgcgtgaccaaaggtggcggttcggccaataagacttacctgtatcaggaaacaaaagcaatcctgaatcccggcaccctggttcctttcctcgttgagaaaatgaagacgttgggtacagctgcttgtcctccttaccacatcgctttcgtcattggcggtacttctgctgagaagaacctgctgacggtaaagctggcttctactcattattatgatgagttgcccactacgggtaacgaatacggacgtgccttccgtgatgtagaacttgagaaagaagtgttggaagaagctcataggattggcctcggtgcacagttcggtggtaaatatctggctcatgatatccgtatcattcgtctgcctcgtcacggtgcatcttgtccggtaggtctgggcgtttcttgctctgccgaccgtaacatcaagtgtaagatcaacaaagaaggtatctggattgaaaaactggacagtaatccgggcgaactcatcccggaagaaatgcgtcatgcaggcgaaggtgccgtggttaagataaacctgaaccagccaatggcagatatcttgaaggaactgactaaatatccggtggctacacgtctgtcattgaatggtacgattatcgtaggccgtgacattgcacatgctaagctgaaagaacgtctggaccgtggtgaagatttgccacagtatatcaaggatcatccgatttactatgccggtcctgccaagactccggctggtatggcttgtggctctatgggccccactactgcgggacgtatggactcgtatgtagagttgttccaaagtcatggtggcagcatggttatgcttgcaaagggtaaccgtagccagcaggtgacggatgcttgcaagaagtacggtggtttctatctcggttctatcggtggtcctgccgctatcctggcacagaacaacatcaagagtatcgaatgtgtagaatatcccgaactcggtatggaagctatctggaagattgaagtggaagacttccctgcattcatcctggtagatgacaaaggcaacgatttctttaaacaattgaaaccttggaattgtagtaaataagaggaatctttctatagattaagtgaaagctgtcccgaggaagttgattaactccttggggcagctttcttggtttaatagatgtagaacttaatatgctccttcctttttcccctaaagctttcatgttaatgttattatgcttacaggcaaaagaacaaaaacaataaagcaaagcttggttttcatacgaccttcttcccgtttttcttattgttcctaagtattccattgtggagtctataagttctgcaacaggtttgcctacaccatcctacatcatcctacactatcctacaccattttacgttatttatttgcttgataatcaagagagaacggttgccggtgtaggatgtaggaaataaagaagtattttttttagtgtcactaacctcaggtggatatcagaaaaataataagatattcttgtatgccgatactaatttctatctttacaccttcaaaatcagattaatcttattgacagttatggaaactactccccacatttctccgaaggcggactcccgtgttgtttggctggatgtcgtgcgactgatagctatgtttaccgtggtttgttgtcattgcacagaccctttcaacttttatccgggaacggctccgaatattgaagatatcaagtttttgggggctgtctatggggcggtgctgcgtccgtgcgtacctctttttgtgatgataacgggagctttgttgctccctgtgcgtggggatgcatccgtattctataagaaacgtattccacgtgtgttttttccgtttcttatctggtcggtgatttataatcttttcccttggattacaggattgctgggagtggaaccacgggtgattcttgacttcttcccgtactcgggcgaagaagtgatgcgccagtctttagctgtcagcatgggatatattgccgaacttccttttaatttttctatcctcgatgtacacatgtggtacatttatttgctgataggactctacttgtacttgccgatattctccgcctgggtggagaaagcttcggagaaagccaaactctggttcttggcagtatggggagtgacattgcttataccttattataatgagtttgtagcgcaatacttgtggggaacttgttcgtggaactcattcggcatgctttattattttgccggttttaatggatacctgcttctggggcattatctgcgcaaccatgactggactggacggcaagctgcactgataggtgttcctatgtttgtggtgggctatgcggttactttcttcggtttccgccacatgacggcattgccggactttacggatgaaatgctggaattgttctttacctattgctcactgaatgtggtgatgatgaccattcctgtatttatgtgggcaaagagagtgaacattcgttcggagcggatgataaaggcattatccaatctgacactttgcggtttcggagtttatatgatacactacttcttcaccggtccgtcagtggtactgatgcgggcggcaggtgttccgttgtgtttgcagatacctgtcgccgcagtggttgcatttggcgtttcctggttcctggtggcaatggcataccgttgttttggaaagaaaacgaaatgggtgatgggatagtgtttgaaggattatcctaatttcaatcgcctgcaatactttaaggagcaggcggctttacggaaagaactgacagtgaaagaacttatgtttatgagtggatttacttcgcgttccagcttctatcgctatttcgccagtattgagaaaatgtctccgagcgagtatatggaaagacttcagcaggaaggttaggggattttaccacagagtaacactgagtttcacagagttcaatattcaatatatgcaattaaagaaataagattctgtgaaactcagtgttactctgtggtgaatcattgtatcttattctttttcttccattgctcgtacttcttcagcactttcagtccgtcgctattataccaactatatccgttacggcgttcgtgtcctatttctgagatatcgaacttcttcactccatcgcggtcactgaagaaaggacggttatcttccagtgtatagaagcgtgcccacaaaggaggacaatccgtacatggtaccatgcggtagtctttctttccttcgtcattggtgaagaactctttctttatgccttcaatcttggatgacttgaaccattcaactgcattttctatacagttgataacctcttgtgagggattgggcagagacattaatagaatgactatttcgtcagactcttgtccgctcagtgaaggtaactcataggcgcgtgctttagcgggagcaagggtgtgttcgtcatgttgtgcacaccagacggttggtttaccatttaggacaacttgcgttttgaggatgcactccacacctttgttgaatgcggcgcaagcacggttgcagatgctgtcggggacatattcataaggggctttcttttcgtatacctcgcgcagaagctccattacatttaccatcgcattgtcattgtaggtgatatgtgtgtagtaacctttgggacggggccagaactgaggccagcctccattgggatattgtgctttgaggatataacggatgccgtccagcgcactgtctctgtatttctcaatatgagtagccagatacaggcgggagaggtattggatttccgtactggtggcgtcgttgtctatggtgctttcgttcacttcatctttggaggcaagtacatcttccagctcttgttctgtcagttcggcaggcatatagatatttttaggccagccgccggtagtttgttgatagagcaggacattgtcgccaatgcggatggcctcaggagttttaaagaattcgtcgtttaacttgggtgccatctttacccaagttttatacggctttttttctttgtagtttacggtttcttgtgcgaataagtttgtcaggcacaacaaggccagacaacacaggcaaatctttttcatggtcgttgttttttatagttctactgatggcaaaagtagaggaaaaaaactcgcctgatggggaatatttgttttattccaggtattttgttactttcccactgatttgcaacaaagaaatctcgcataatttagtgttgtactccgctgaaagaattctttcttctgcatctaaaaggcttttctgtgcttcacgcatttcgatacctgaaaggtttcctagcatataacgctccatggcaatctcatggttttctttggcggctacaaggttctggcgttccaggttcagcatttgcaggttgttctggtaagcttgccataagttgctcaggtctgcacgtaaggcttgttccagttgttcgcgttccaggcgggcattctgaatggcaatacgtgcattgttgcgttcccggcgacggtttccgtcgaacaggttgaaaccgatagtcaggccgaagttggcaccaagattaccgcgttggatgttagtggcgatatcgtatttgttgaaggtatagccataaccgccgttcatcttcagataaggataatcgcgggaacaaacctttttgtaatccagctgggcaagcgtgttgttttgataggctttcaacagagaagcgttggtttgcagagtcatgttccaaagttcttcaaagtttagtccaccgtctacgttgatcagactgtcttgaatgatgatgggctggtctacatcttcgttcgccatcagttcgttcagttggatacgggaggtatgcagcaactcttgctgtttcatatactgggcactgtctgcattgaagtctacctttgcctgttggtaatccagacgggagaagttgccgatgtgataacgctcttccacgatacgcaaacgctctttggacaaagatacggcatagcggaaattattcagacggatcttatgttgcagatagttgtaatattcggcagcgatgttggctatcaggtcttctacggcgatacgggtattggtttcaccttgtctttccaactctttcagacgttggtagttggcggtgatgttgaagccgtcgaagatagtccagttcagattaagacccacgttcatggtctgatcgaatacaccattctctttgagatgttctccggtagcccgcactttactgtctgtattgtctacggttcctttataacttgcagagaggtcaagtgtcggcagataaccggcgtttcccagcgtggcgttgtttttgctgacttgttcctcgttgcgggtaatgcgcagcgagtagttattttgaagcccgtattccaggcaggactttaatgtataagattgcggcatctgcgcttgtaatgcaagcgaggtgctacaaatggctatgagggataaaatcgtacgtttcatgatttctttaacttacttctgttagtggatacataactatatatggcaggtacgatatacatagtgaggaatgtggataccaacataccgcccactacggctgtacccatggcaatgcgctggttacaaccttcacccgaagcgaatgccaacggtattagtccgagaatggtagaagcactcgtcattaggatggggcgcaaacgttgcagggatgcatccttgatggcttccattttatcttctccggcttcctgtttctggttggcaaactctacaataaggataccgttctttgccaccagaccaatcagcatgatgatgccaatttggctgaagatattcattgtaatatcgttgaagtacatgaataccaaggctccggcaatagccaaaggcacggtaagcatgataatcaacggatctttgaaactctcgaactgcgctgccagaatcaggtagatcagcagaattgccaatacaaaggcaaacatcagactggaagaactttccctgtactctttggagtctcccgtcagtgcggtacggaatgtttcatccaatgtttctttggcaatcttatccatctcgtccaatccttgtccgatggttttcccatcagcaagtccggcagaaatagtggcggaaacgaaacggttgtaacggtacaattgcggaggagcgataccgccggtcagttcaatcaggttgtccaactgcaccatttcacctttatcactacgaatatagatgcctttcaggtcggaaggcttgttgcgttgctggcggttgatttcacccaatatctcgtattgctttccgttcatatagaaataacccatacgctgaccgctcaatccgtattgaagcgtttgcgcgatattgcgtgtgcttactcccatgatacttgccttgtcgcgattgatattgatgcgggcttccggcttgctgaatttcaggttcacgtcggccatctggaaaaccggattttcataaaccttcgccataaatatcggcaacacctcttgtaatttctcaatgttggtagcctgcaatacatattgaaccggcataccaccgcgtcgtccaccgaaagaggacgattgctgtacgaacgaacgcgccttggtctttttctgtacagcctgcgaaatcttttcggctacttccatctgtgtgtagtcacgctctttcatgtctttcaatgtgatacgcacgttaccgctaccacttgacacgcgtgccgttaccgattctgcatccggcagaatggaatctaccaactggttgatgtcttccgtataatcccgtatgtattcgtaagtcacaccctccgcaccacgcacgttgatactgatttgcgagcgatcttccaatggtgccatttcggcagggatggcattccatagatatacgataatgattaatgttcctaatacaagtggcatggccagccagcgtctacggagaaaaatttccaatgatcggctgtagatgcggttcattccttcaaagaatggttcggtttttatatagaaccagtttttcttttcttgtttcactaacaacttggtggcaagcatcggagtgaaggtcaatgcggcaaaggaggaaatgatcaccgaaccggataccacgatgctgaattcgcggaaaagccgtcccgtcattccgtccataaacacgatagggaagaatacggctaccagcgtgatggtggtagagattacagcaaagaaaatttccttggcgccctcgatgccggcctctttcggcggcattccacgttcaatgcggacatagatgttttccgtcattacaatggcgtcatccaccaccaagcctactgccagcactaccgccagcatggaaagcacattgatagagaatcctgccagatacatcacaaagaatgctccgataagcgaaacggggatcacgatacagggtaccagcgttacacgccagtcgcgcaggaagaggaagatgatgatgatgacgagaataaatgccacgtataccgtttcctttacctcattgatagaggcgcggataaacttggtattgtcgaaaccataagagtatcgcacatcatccggaaggtctttcttcatctgttccatgcgttcgtaaacggcatcggcaatcttgatgtggttggcgcccggctgaggtaccacaacaatacctaccattggtacgccattcattttcatgtagctcttgatgtccgcaggacccagttccgcccgtccgatatcactgaaacggacaatgcggttgttgtcttcccgcaggataagattattgaattcttctgccgtgtgcatcaatcccagagtacggatggtaagttccaccgtattaccttcgatacttccagacgggagttccacattttctttatctaccgcattctttacgtctatgggggtaatgccgtaacccgacatcttgatgggatcgagccaaaggcgcatggaataacgcttttctccccagatactgacaccacttacgtctgcaatggtctgcaattgctctttgaccgtgaggtctgcaatttcgctcaattccagcaaggaacgtttgtcgctttgcaatgctaccatcagtataggcatggcgtccgcatctgcttttgatacggtaggagggtcacagtcgcgaggcagataacgctgggcgcgtgaaactttatcacgcacgtcgtttgcggccgtttccaggtctacggagagttcaaattctaccgtaatacgggatgaaccttgctggctgacgctggacaaggaacggattcccggaataccattgatgttttgctccaatggttcggtaatctggttttcgataacatcggcatttgcacccgggtaggagcaggataccgaaatgatgggattgtccactgacggatattcgcggacgccgagatagctgtacccgataagtccaaaaagcaggatgataagggtaagcactgtggagagcaccgggcgccgtatgctgagttcggatatgttcataaggcgtctggtttaatagatattatccaatgttacgggtaatcctgtgcggagctgcaatgttccggaaattataattgtatctccggtctgcaaaccctgcaatacttgggtttcagcttctgtacgtatgccagtttgtatttctacaggttgggcttttcccgatttataaaggaaaatcttgtccttacccatttccggaacgatagcttcggatgggacggcaagggcatcatggatttcattcttacttaaacggatatccgcatagcgtcccggcattacattaccgttgacattggggtagagggcacgcaatgtcaatgtatgggtgttttgatccattctcgactcgcgtgcgtacactttggcatggaacgtttcaagtttaccctcaagtccgaagtttactcctgcaccgatttttacgtcattggcataacgttcgggaacggaaaattcgactttcagcggagatacttttgtaagtttggcaacgatagtagtcggggaagcataggttccaacactgacctgacgcagaccgattacaccgtcgaacggggcacgaagctcggtttgtgcaatgttagcttctatcaagtctatgtctgcattcagggttgccagttcagtttttacctgctcgtaggcttctttactgactgcatcccgctccaacaatgcattctggcgaaatacgcggtcttctgccaatttcagttgggcaacaagacgctgcaactgtgcctgtaaaggccggtcgttcactttagccagcagttgtccttttttaacctggctgccttcctcaaaattgatttctatgattttacctgaggtttcgaaagaaagatccacttcttcatcaggtaacaggctaccgctgattttgatttcatctttgagcagctgtggctttatgatctttgcgtttacatttaatgcttttttgccattgcggttactgctcataactttatcggcagctgccaattctttattctctttaggaagctgggaataaataccccaacctatcagtccggcaccaatgaaaatgataatgccccatttaacttttttattcatgtatcagtattagtattatatcagatattaagttagattatgtagcactaatttggacatattaggaacagaaaggtttaatgcgagaagcgttaaaaaaggtaataaagtgataatgtaatagcacaatagcgtgttattatgataggatgataaagtaatagactgataaaacgttatcacattgttgctttatcaatctatcgctccttttaatatgcagcccggtatttaccttcctctttgtcttccaacatgttaaggtatgaggcataacgtgattcgctgatgtagtgctcctccacggcttttcgtacggcacaccccggttcgtggcgatgcgtacagttaccgtaacggcaatcggcagagagcttaaatatctccgggaaatagtgtcctatttcctcctcttccatatcgaatgttccgaaacctttgatgcccggtgtgtcaatgatatatccgtctcccggaacgggaaacatctcagagaacgtagtggtgtgcattcctttgttgtggtaggcggagatctcacccgtttttatgtcctgttcaggcaatattgcgttgatgagcgttgattttcctacaccggagtgaccggagaaaagtgttacccgccctttgagttcttcctgaatgagttcaatgccttcaccggttttggcggagactttaaagcagggataaccgatagtggtatagagattgatgaggctgttcatataatgaagttcctcttcattatatgcgtctattttattgaagatgatctttaccggaacacggtatgcttcggcagaagccagaaaacggtcgataaaggtggtggatgtttccggatagttgaccgttacgataagcatgctttggtcaaggtttgcagcgagaatatgcgattgcttggagagattggaagcacgacggataatgtaatttttccggtcttctatttcactgatgagagctgttccttccggattcagaatgatttgcacatagtctcccacagctaccgggttggtactgcgaatgccttttaaccggaagttacccttgattttgcactctacacatttaccttcgtcggtttttaccaaataccaactacctgtattttttattaccagtcccttcaatttagttgagagttgagagttgagagttgagagttgagtatgcgcgaataactctccactctcaactttcaactctcaactgaataattatacggtcatgatttctttgtcctttgcagccagcatatcatcaatttgcttgatgtatttatcgtgaatcttctgcaatttctcctcacctcctttttgtgcatcttctgccaggccgtctttaacagacttctttaggccatcgattgcatcacggcgggcattgcgtacgctcactttggcagtttcgccttcacctttacactgtttggcaagttgtttacggcgttcctcagtcagcggtgggataccgatacggatgatttcaccgttattttccggcatgatgccaaggctggagtcaatgatagctttctcaatcacccggaacatgcttttgtcccatggcttgatgacgatactacgggcatccggagtatttacggcagctacgttattgatgggaaccatgcttccgtaagagtccacacggataccgtccagcaaacgaacgtctgcttttccggcgcggatgtgagccaatgcttcttccagatacatgacggccatatccattttttcttgcgcttcatctaagatctcttttacttctctcatatttcttagttttgaattgtgcttttagaatttttgattgaacaaaagtagtataattttgtctatttgcaaaatattagctaacaggaataaagcaaattgcgtatatttgattagtgattagcgtttactgcatctatactctaatacggcatatactggtggtgataagaaataagtgcttagttctttttcaggtattcctatctttttttctttcgaaagctaacttcttgtcatgcgaatatttattctttccaccgcggagcttttttctttccaccgcggtggaaagaaagtttctccacggtggaaagaaactttcaccgtggtggaaagaataactgtctgcgatgattttacttagcagttgcgagaaagagggatagaaatggcggtgtggctatttaatctgataaatatggaattgaaaacaggacagagattttaaaacaaaaaactccggtaaacatctgcctaccggagtctcttactatttgattgttttttatcagttatgtaccaatgtacctatttcttctcccagcattacctttttcaagtttcctattgtatccatgtcaaagacaacaatggggagattattttccttacacatgcatgttgcagtaagatccattactttcagtccacgtttcagaacttcgtcataagtgatatcgtcgaattttgtggcagtcggatctttttccgggtctgcggtatagataccatccacacgtgtaccttttagcatgacatcggcttcaatctcgataccgcgtagagaagagcccgtgtctgtagtgaagaacggatttcccgttccggcagacataataacgacttcgcctgcttccatgctttcgatggctttccatttattataaaattctccgataggttccatgcgtacggctgtaagtacacgtgcctttacgccggtagctaccagggcggagcttagtgccaaactgttgattacagttgcgagcatacccatttggtcgccttttacgcggtcgaaacctttgtttgcaccactcaatccacggaaaatatttccaccaccgatgacgatacctatctgaacgcccagtttatggatttccttgatctgtgctgcatattcggcaaggcgcttctcgtcaatgccatattgtttttcgcccatcaggctttcgccgctgagctttaacaggattcttttatactttgccatatgatattacatttagtttctgcaaatatacgctttctgtctgtaaagattaactttggtacagaatttttctacttaaaactgcctgcatgatgccacggagagataaatagacgacgaaagcgagccagagggcatgatttcccatccactcgtgtaaagagtaataaacaaggaagaaactgccggaagctaccagcatggagtaaaacatttgccgggtggcagtggctcctataaaaatgccatcccacaggaaagcggcaaaacctgtaagtgggattgccaatacccaataaaagtaattttcggcttcccgaatgacggaggtttcattagtcagcagtcccaggaatgacttgcctccaaagaaatagagtaaggtgaaacctgtggaaagaccgacaccccaaatgaagagcaggcgaaccgtgcgatataatgccgatcgattattggcaccaacatatttacccactaacgcttctcctgaataagcaaaaccatccatgatataagaaaatagagtgaataattgcattagcaaagtattgacggccaatactatttctccttgtgccgctccggcagaagtgaaaaatagagtgacaatgaccagacagagggttcgtagaaagatatcccggtttacctggaaaaaacgcagcatggcttcttttttcagcacttcatgccaagcaacgtgctttttaagtcctccataatatcgcctccataacaataatgccatcaggaaaccggcatattgagctgtaagtgttccccaagctaccccggcaactttcatgtggaacagataaacgaaacaaaggcttgcggcaatattcacaatattttgtgtgatggcgatgtacatcgggaaacgtgaattctgcataccgatgaaccaacctgcgaatccatagagtccgagcatagcaggagctccccatatacagatccggaaatagagtgtagccaatcgctctacttcctctgtagtttgtataaaagtgaatgccagcttccggatgggatattgcaatgttactaagataatggcgataagcaatcctactccgacagaccgtaataaaagtcgtgcaacttcatccagatcatgtttgccgtatgcctgtgaggtcattccactggtccccattctcaaaaatccgaagatccagtagataatgttgaataacattccgcccacggcaatggctccgatatatgcagcggctcccagatgccctacgattgttacatcaatcagtcccagcaggggaactgttatgtttgatataatcgagggtacagctatctgaagtattcttttattgataatgttcggagtttgagcaatcattttaaaactctggtttgttctatttaccgacaaaggtactctttttgtcgcaaacggtaaaaaagtacctgataataacaatttttataatacataatattttaaaaatgagtatatttgcggtaacaaaaactgggtaatatttaataagagatgagaaccttaactttgctattttcattaatagttactttcccctttgtgctctctgcgcaaacggcgggagaacttctacagaaggtgtctgctgccttgtctgaggggcaggatgattatgttgtgagtctgtttcgtcaggcgatagctgccggagccgatcagactgaaatgtattactggactcaaatagaaaaaaacagtgccgtggctccccgcctggtcaatgagctggcaacctattacaagcgtaagcggaattatgacaaagcttatcttttttatagagaattcttgcagtatcattccgaagatgttcctgcacttgtgtcgtgtgccgaaatggagatgatgagaggcaaggaaaaagatgccgtcaaaacttatgaaaaggttttgatgctggatgccaataatctgcaagccaatattttcctggggagttattattacctgcaagcagaacgcgaaaagaagaagctggaggatgattataagaaaataacttctcctacacggatgcaatacgcccgctatcgtaacggactttctgatgtctactccaatggttactccaaagcaaaggactatttgcagcgtgtgttgcaactgtttccttccacagaggcgggaaataccttggaaaagatcaggaaactggaagcggaaattaagtaagctgtaataagctttccgcgttttctactgctcttttgcaataatagcccgatgcaatctttttgttgatctcctttatattcctgaccatttcgtcataggattctgtggaaatggatgataatatggagtctaactcttccagtgaatcaatacacacgcctattttgttctctgcaacaaatgaggccaatgctgcttctttccatataattatgggaagattgcagcgtatgtataaggataccttgtgtgggttgtttatcctcaggtatatcccgaaatctcccgagcaagtatggatagagtctccttcccatattaagccaaagtgggcgctgacttgttctattaactgatcagaaggcacaaaacctttaaatttgaacaacgtcttgtcttctattttggcttcctcgaaccctccgccgtaaagttcaaattgccattttgacatcacatcattcaaagagtacaggtatctgtttttcttgtaagtcagtgctcctgcatagatcaccttaattgggttctgattaggttcctgtgtattgttgtttacggaaggagatagataatcgaaaatctccaggcataccataggtttggtgtatccttgttctttcagccatatctccatcttatcgttgtgtacgatcagtacatccgaatggttgaggcgtttgatttcctgctctgccgtcaacttctttcttctgaaagttcccaagtcatggataatcgtgataacctttccccgtttcaagtgtatgatattacatacgaaagagtaatacttcttgaaaggatactggacgactaccacgtcattggcagaaactgtaaacaaaacttttaatactccggcaagggttattaaaaagcctgctatcttgttggaataagtggtttgcggtagtccggcatttttatatcccagtttagagagagtctcttctatatctgtttttgccttattacctgcattgttcaggccattatagtttttggatagataatatcgggtcattattttgttcttttagattgataactcctttttagtgagcaatatggcggatgcaatagtatcatccatatcgaaatatgcatattgtcccaaacgtcctccgaaaatgacacgggaatctttttcagccaataacttatacttattgaagcattttaaattcttttcatcattgatgggatagtaaggttcgtcggaaggtgtgtattcctgaggatactccttggttatgatggttgaaggctgttttccgaattcaaaatgtttatgttcgatgattcgtgtaaatgggtatttagcttcattgtagttgattacggcattaccttgataattgtcaatatccagatggatatgttcaaacttcaggctcctgtaatccagtctgccaaacttatattcaaaatactcgtcgatgcaacctgtgaaaagtatcttttctgctatactctgaaaataaggaatattgttaaaatagttcgtatcgatttgaacattgatatcctttaacagattgttggtgagtgcagtgtatccatctttagggataccttgatagggatcgttgaagtagttattgttatatgtaaggcggaaaggtattcttttgatgatggaagccggcagttggttggcggggcgtccccattgcttttccgtatattccttaataaaagtgtaatatatgtcgtctccgcaaagtttcagtgcttgttcttctagattagcaggctgggatatgtctttatatttagagcattgttcctgaattttatgttttgcttcttctggagtatttacgttccataacttattgaatgtattcatattaaaaggaagattgtaaagccttccttcgctgtatgccaaaggggagttaacgtaattattgaattttgcgaatctgtttatgtaatgccagacttcttcattgtccgtatggaatatatgtgctccataccaatgtatttttatatcactttcttctttggtgtaaatatttcctccagtgtggttgcgcttgtcaatgaccaggcatttctttccgttttcattcataatctgagcaaaaacagaaccgaataaaccggaacccacaatgagatagtcatatatatactttttcatttatttaatgcttctggtttgcaaagtaacagaaaaataaaatcttatcaaagcatttgaatatgtaaaagtatgtggtgcaatgcaattatagcgttatccgcctggcaaacgagttggctacgtattataaatgtaagcggaattatgataaagcttatttctgctctcatggtgtatgccgaaatggagatgatgcggaggaaggaaaaggattcatatcaagttcaagttctaaatgcgacacctgttttttgagtttgtcaaagaatgtattgtacttccttaaacagatatccgcgtacctttcctgcctgatcttcaagaataaatcgcccgtccggttctacgcataacaggcgtgcaaggaattcaccgtctgcgtcggcatagcggtggaaaccttcccgacggaaaagagagcgggcatatcgttcggcaatgcagttggcggcattgcccgaagagtctgtttgcagaaggatatagtattttttgagtcgcctcatgatattggcgagtatcagatagcgttcatgttcttgtcctgtgatctgctttagagataccgggttgggagcgtcgctccgaaaggtttcctggtttatgttgacaccaataccggaaatgctgcgtccaatgtgatgtccggagaggtcgttttctatcagtatgccgcaaatcttcttttcgttccagtagatgtcattcggccatttgatggaaatgccttttgtccattcgtccaactcctctttaatggaaagggagacgatttgagaaaggatgaactggcgacgggcttcaataaaagtaggatagagcacgaaactgaatgtgatgttccggcaatcttctgactcccaactgttgccacgctgccctttaccggcagtctggcgctcggctatgaccgtcgtgaactctcggacagcggattgctgttcgttgcaaagttgagttaaatagttattcgtagagtctgtttccggcaatatgatcagtgggacaggaaactctgtgggagtaatcatcaaattcagttctttcttcatatcagggcatcatattcggtacgcattttcttggtgaacttctttagtacttcctcataagcatggtcgatgaggctctttatcagtttatcgtccacatctccgtcaaggaagatttgattccagtatttcttgttaaagtggtaggcgccctcaatagctgagtaatgctcacgcaattctattgcatactccggatcacacttcatacagattttgttagagccttccaagtcaatcagtacaaacatcttatccatcactttcatcacaagtgaatactcgtcgaacggaagacattccgttacggcttttttggcgagacagtattcgcgggcggtttctatatccatactttctgtttttaatttctattaatttacgggtgtccggttacgaaatttgcttgaatttcaccaaatcccatccgcggaacactagggcgattgcgataatttccgtagtacctttcttttcctgtactttcggacaggctacatattgcgccaactgtattcctgcatcttccagcaacttctccacttctgcatctttggcgtcgcgggggcaatacttcacttcaatggcatagctgtacggcatatcgggcagttgcggaaggttgggtatcaggtagaagtcggagaagcctttgttcatttcgtattcgggcattgttatgtagtaactgttcatgcccatataactgaggagaaagcccttgacgtgcgcttcaccttccatgaattcgcggatggagctttgttcctttagccgggtggcgatatattggaagtagctttcccattcacgggaataagccatgccgtacatcagttgattcagttcgtcaacatccaggttcatgtgtccggcggtgcggtatgcgtctgccagatagccgtatagttgttcacgcaccacttggttggggattgtcagttgcagcatcggtccgcgtgtacccgctattgtcagcattccgtaatagaagagcagactcttgaaattatccgtttgcgctatctccacggcggggaaggactcttttatcctgccaaccgtttcaccctgtgtgatgatttcttgaatgatactggcatttttgccgaagtttttgtctataaggatgaggtggcgcagtttgttatagtcagtgcggcagttggtgtcgagcatgttttcgggtggcagttgcgtgcttaaataactgttcacgaagtagagaaccatatctgaattatacattggcagttcctttagtgaacgacctgagaaacagtaattatcataccacggtttcatcatgctgatcaactcatcgacgggatgaatgatttttccttgctgccggtagtattccagcaattcccgtacttcggcttcggtgaacccgatcatgttgttgaataccgggttggtgctttgattgctggcgatattgaagccacttgtgagatcgtccatcgttacagggctgacaccggtgatgtacatacgttccacaaccctgtcagtatagtctttgacggttttgagaaagttccgcagaaaaccgtcgccatgggtgagggagcgataacgggtattgccgtagttgaccagtacgttgttggcaaagttatcgtattcgtcgaggatgaggtacatcttcaggccttgtctccgcaatgacaggcataccgcggtcagcttctcggaagccacttctttttgttgtaccatttcaagggtgtctggtggcagtaaatctgcatatttcagacaaaagtccgtaaatatcatgtcgcagttactgttgaatgaggcttccattttttccgggtcggagacgatactggagaagctcatcttcagcacaagatacttgttgcggtctggggtaggatgttttcccacgtataagttgccaaacagttcatcaaattgtttttctgtcttacaatcataatagcattccagcatattgaggaaaagactcttcccgaaacgacgggggcggacgaaaaagaagaaacgggcagtctgttctatctgtctgatatattccgtcttatcgacataataatagttattacggataattgcaggaaagtctgtcatcccgtaagggattagcttagtggaatttgcctgattcataaatagagtttttttagaatatttccgaacgaagatagagagttttcccgaaacgggcaagaagaattacgaaaatgctgtgtaaaagcacttttcatgtttgattcagaacattggcggataaaatgcatctttgatatgttttatttcaaatgcatcagcttcaccgataacggtaatgatatcaaagcggacaggggcatcaatactgaaatgtttgatgtaagcatcagcggctactacaatatggcgtactttctgccagttaacggcatcttgcggttcgatgtactctgtattactgcgggtttttacttccaccacaattaatagtccgtccttgactgccacaatgtccagttcgagacggttttttcgccaattacggtggttgatggtgtatccgttacgttccagatacgccactgcggcgtcttctccggcctttccgagggtattgtgtgctgccatatctatattcatccttatttttagctgtttctatgcaaaaatacgttttttctgctttgtatttacagaagtaaaactaattttgcaggaaatatgagaaagagagataaaacgtgtgcgaaagcaacacccgaagaacccaaacgcgaacagcgtattgtttgcctgatgagcgaggaagagctgcggattgtagaccgttatctggagaaatataagataacgaataaatcgcggtggctgcgggagactattctcatgtttatccataagaatatggaagaagattatccgacccttttcggtgagcatgatatgagacgataaagagaattctttaatcctaattaaattgaagtggatggacgataactattatatgaaacaggcgttgattgaagcacgtaaggcttccgaaagaggagaagtgcccgttggcgcagtcgttgtatgcaaagaccgtattatagctcgcgcccataacttaacagaaactttgactgatgtgactgctcacgctgaaatgcaggctattactgccgcagcctctactcttggcggaaaatatctgaatgaatgtactctctatgttacagtagagccttgtgttatgtgtgcgggggcgattgcctgggcccagatgggaagacttgtgtttggtgccggagatgagaaacgtggatatcagcgttatgcatctcaggccttgcacccgaaaacggtagtttcacagggcattcttgctgaagagtgtgcagtgctgatgaaggatttttttgcggcaaaacgtcgctgaattctaatatagttcctctttttgatctgtacttcgtattttatccgtatatttgactacttaacagattcttaaaatgcattatgtaatggaatatcatcgtatatcttttattcacaacgatacagagtattcatttatcaaagctatgaatgacagattagtgggatatgccttaatgtctgcttgtcggctggaagttcaaatttatatgaaggagcataatctgagaggtaaatacattcttaccggcatggcaaaaatctgattattctttaatttcttcaaaatccacgtattctccttcatctttagaaaaaagtttcttgtgttttctatggatatcatttccaggggaagttgtttctccgttggattgcgaagaagcatcctgttgttgatcacccgagaaagaataacctctaccggattgataacttcctccgccattttggtaagtacctgaagaactacgacgtttccccagtccgaaaacagttcggagaacggtgccgatgatgctgagtccgatgaccagaataacgactataatgacaaataaaaatcctaagatgtgaaacatgggctaatcgtttttatatattgttcgtcttacgaacgatagtacaacaaccgtgccagaagatttgtttagagcttctttctcacaaaccagcacagaatgatgtaccagccaatgacagctgcaagtcctacaaagataagcaaaggaatactgactatcaaaaacaaataacggattttattttcttcccaagagaaattcttcagtttgaaggcgaacattgggaattcagataccagtaacagagagaataatacgatgcaaatcaataaaccatacaagactactccaccttgtatcagccaatcatggtattgtgccgctgctgctgcccaaaataaggtattggcaggagtatttaggccgatgaatgagctggtctggcgttcgtcaatattaaatttagccaaacgtaatgctgaaaatacagcaatgaggaaagcaaaatagggaacatattcttgaaaactgctcatccagtcgggataagtagtttcgcgtaatagagagaatacaattactgagggtactactccgaagctgacgtcatctgccaaagagtccaattcttttccaataggagaaggagcattcagcaaccgcgctgacattccgtcgaggaagtcaaatacagcgctgataataatgaaggtaagagcccattcatacttgaactcgaaagccataacacatgcaatacagcctgagaacagattcagacatgtcaatgtattggggatatggcgggtaatacagttaggcattgtttagttattttagtttggctatcacagtctggtttcctgtagtggtttgtcccatctttacgaacacttctgtacccaacgggagatatacatctacacgggaaccgaatttgataaagcccatgtgttcatcgatataacagtcttcaccgggttcggcataggtgacgatgcgtcgtgccatcgctccggcaatctgacgtgccattacttctacaccttcgggagtttcaattaccactgtagaacgttcgttgtccgtactggctttcggtaaccaggctttcatgaactttccgttatgatgggctaccttcttcacggttccgtctaccggataccaattagcgtgtacattgataacactcataaagatggaaatcatgagccgacgatcgtggaagtattcattctcatccacttcttctataactactattctaccatcggcaggtgccaccactattttctcggtgtcttcctggccaaacaggcggatagggcatcggaaaaaattcaccagcattccatacaggacaatacttaccacagctacgatatagaatggcactttgcattctaatccaaagtagagagcggaattaacaaccagtagcaacaataaactgccggccagtgtatgtgttccctcacggtgaattcgtatcttttttagtttttttagtcgactcatgtaagttgttttattcttcgaatagaaattatcggcaaaaataggcttattttgaaaatctaacaagcatttggggcgagaaatgcagatgttgataacttttagggaaatatttttgttaggtcttatatacgttgtacttttatgctctcaattgaaaggagatatttatgcaggattttgttcatttgcacgttcatacccagtactccctcctcgatggtcaggccagcgtaagcgcgttggtggacaaggctatgaaggatggaatgaaagggatagccgtgactgaccacggtaatatgttcggcattaaagagttcacaaattacgttaacaagaagaatggtgggccgaagggagagattaaagatctcaaaaagcggatagccggtattgaaagtggtgagatagcttgcgaagacaaagacgcggaacttgctgattgtcgtgcgaagcttgcggaagcggaaaataagttgttcaagccgataatcggttgtgagatgtatgtagcacgccgcaccatggataagaaagaaggtaaacccgaccagagcggttggcacttgattgtgttggctaagaatgagaaaggatatcataatctgataaaactggtatccagagcctggacagaaggatattatatgcgtccgcgtacagaccgtaacgaactggaaaagtatcatgaaggattgatcgtctgttcagcttgtattggtggtgaggtgcctaaaaagatacttaacgaccaattggaagatgcagaagaagccgtgcgttggtacaaaaatctttttggtgaagattattatctggagttgcaacgccataaggcaaccgtgccccgtgccaatcacgaagcttatccgctacagcagagggcgaatgccaagctgatagagtttgcaaaaaaatacaatatcaaacttatttgctccaacgacgttcactttgtaaacgaggaacatgctgaggcacacgatcgtttgatttgtctgagtacgggtaaagatctggatgaccctaaacgcatgctttataccaaacaagagtggatgaagacaaaagctgaaatgaatgaattatttgcagacattcccgaggctttgtccaatacgctggaaatcctaaataaagtagaatattattcaatcgatcatgcgcctatcatgccgacttttgctattcctgaagatttcggaacagaagaagggtatcggcaaaaatatactgagaaggatttgtttgatgagttcactcaggacgaaaatggcaatgtagtattaagtgaagaggctgccaaggctaaaatcaaacgcttgggcggatatgaaaagttatatcgtataaaattagaagcggactaccttgctaaacttacttttgacggtgctaaaatattctatggtgatcctctgtccgaagaagtaatggaacgattgaagtttgaacttcacattatgaagacgatgggtttcccaggatacttccttattgtacaggacttcattgctgccgggcgtaatatgggtgtctcggtaggtccgggacgtgggtcagcagccggttcggcagtagcgtattgcttgcagattacaaaaatcgaccccattaaatatgacttgctgtttgagcgtttcttgaaccccgaccgtatctccttgcctgatatcgatatcgactttgatgatgacggacgtggtgaagtgcttcgctgggtgacacaaaagtacggtcaggaaaaagtggcgcatattatcacatatggtacgatggctaccaaacttgctatcaaggacgtggcccgtgtgcagaaacttcctctgtcggaatctgaccgtttggctaaattggttcccgataagatacctgataaaaagctgaacttgcggaatgctattgattatgttcctgaattgcaggcggctgaggcttctcccgatcctttggtgcgtgatacgctgaaatatgccaaaatgctggaaggtaacgtacgtggtacgggtgtgcatgcctgcggtacgattatttgtcgtgacgacattaccgactgggtacctgtaagtacggctgatgataaagaaacgggtgaaaagatgctcgttactcaatatgaaggttcggtaattgaagatacaggcttgatcaagatggatttcctgggattgaaaacattgtcaatcatcaaggaagccgtagagaatattcgccagcaccgcaagctggagttgaatatagatagagtgcctattgacgatcctgctacttataaactatatagtgatgggcgtacgattggtacattccagtttgagtctgccggtatgcagaaatatctgcgtgagttgcaaccttctacttttgaagacttgattgcaatgaatgctctctatcgtccgggacctatggattacatcccggattttatcgaccgtaagcatgggcggaaaccgattgagtacgatattcctgtcatggagaaatacctgaaggatacgtatggtattacggtatatcaggaacaggtgatgcttttgtcccgtctgttggctgacttcactcgtggtgagtccgatgccttgcgtaaagcgatgggtaaaaagctacgtgacaaactggatcacatgaaacctaagttcgttgaaggcggacgtaagaatggacatgatccgaaagtacttgaaaagatttggggagactgggaaaagtttgcatcctatgcttttaacaagtctcatgctacttgctattcatgggtagcttatcagacggcctatctgaaagctaattaccctgccgagtatatggcagccgtaatgagtcgaagtttgtcgaacattaccgatatcactaagctgatggacgaatgtaaggctatgggtatcaaagttcttggtccggatgtgaatgagagtaatctgaagttcactgttaacccggaaggaaatattcgttttggtcttggtgcagtgaaaggtgtgggcgaaggtgccgtgctgaatatcatggaagaacgtgagaagaatggtcctttcaaaggtatattcgactttgtgcaacgcgtcaatctgacagcttgtaataagaagaatctggaatgtctggctttggcaggaggtttcgatgagttcccggaattgaaacgcgagcaatattttgccgtgaactctaagaatgaagttttcatggaaactttggtacgatatggtaaccgttatcaggcagatcaggcagctgccgccaattccttgttcggtggtgagaatgtagttgacatagctactcccgaaattcctgaagctgaacgctggagtgatctggatcgtctgaacagggaacgtgatctggtgggtatctatctttccgctcatccgctggatgaatattcggttgtgttgcaacatgtttgcaatacgcgtatggctgaactggaagacaaagcggcacttgccggacgtgaaataacgatgggaggaattgtaacttctgtacgcaggggcatcagtaagaatggtaatccttacggcatagccaagattgaagactattccggttcggcggaacttcctttctttggtaatgattgggtgacctaccaggggtatctgggtgaacgtactttcctctttataaaagcgcgttgccagccaaaacagtggcggcaggatgaattggaagtaaaaattacctctatggaattgttgccggatgtaaaggagaagttgatttccaaaatcaccattctgataccgctttctgtgttgaaccaggctttggttacagagcttgcggcgctaatgaaagggaatcccggaacgacggaactttatttcaaagtgagtgatcctgatagtaagacagtggtagatatgatttcccgtccggtgaaactttccgtagggcgtgagttaatctcttatttaaatgatcgtccggaactggaattccggataaattagtatctttgcttccataaagattttgacagtaatcattaaacattaaataattaatcaataacgcaatggctttagaaattacagacagcaactataaggagatccttgcagagggtaaacctgtagtaattgacttttgggccccgtggtgtggtccttgtaaaatggtaggtcctatcattgaagaattggcagaaatgtacgaaggacaggttcttatcggtaagtgcgatgtagacgaaaatggcgatgtagctgctgaatacggtattcgtaacatccctactgtactattcttcaaaaacggtgagttggttgacaaacaagtaggttctgcttccaaatcagcttttgatgataagataaaaaaaatgctcctctaaagagcataatataaataaggtattaacctttaaaaaactaactattatgggactggaagacgatttcttaaaggatgatctcgatgacgaaaaaaccatcgaatacatcaagaattatttgccgcaggagttaaaagagaagttctctgacgacgaattctattatttcctcgatttgattgacgagtattattctgaaagcggcattctggatgtagagccggatgaagaaggatgtgtcgaagtggatctggggcaaatcgtggattacatcatcaaggaagcccacaaagacgagatgggtgactatgatccggaagaaatcctgttcgtggttcaaggtgaactggaatatacggagtcattggatgatgatgaagaatagaaaggttcagttaagtaaaaaaggagtccggacagtttgttcggactttttttgtggaattattccacacttgtagagtagattctacactcttcattattcttgttaagtcatttaatgcgttggctatgaataataaaggtacaaccatcgaactttggcacgccagttgtgttttttatttatagggtttttaacattaacataaacagagagcttatgaaatcgttttttaagaagagagaaatcagaataacgaaaaggcaggcagtgattgccgcaatagctgtagtggtattggtagcaatttattggtttgttacccaccgaccggcacctgcaccggatcttccggtggtagctgtggaaccggtgatacaggatgacgtggaaatctatggtgaatatgtaggacgtgtccgtgcccagcaatttgtagaagtccgtgcccgtgtagaagggtatctggaaaatatgctttttgaagagggtacttatgtgacgaagaatcaggtattatttgttatcaaccgcgaccagtatgccgcgaaggcagacaaggcgcgtgcgcaactaaaaaaggatgaggcacaggtacgcaaggcacagaacgacctggagcgtatccgtcctttatatgaacagaatgctgccagtaggttggatttggataatgcagtggctgcctatgaaacggctgaagcaagtgttgctatgagtcaggctgacctggatcaggcagagttggaattaggatataccattgttcgctcaccgcttgcagggcatatcagtgaacgatatgtagaccttggtacgctggtggggacgggtggtaagtctttgcttgctaccattgtgaagagtgatacagtactggtagatttcagtatgacagcattggattacctgaaaaccaaagaacgtaatgtgaatctgggacaaaaggattctacccgttcctggcagcccaatatttctataacactggcagataacactgtttatcccttcaaaggtttggttgactttgctgaaccgcaggttgacccacgtaccggtacattctctgttcgtgccgaaatgcccaatccaaaacatgtattacttccgggacagttcactaaagtgaagctcttgctggatgtacgggagaatgcaacagtagttcccctgaaatccgttatcatcgagaaaggtggtgcttacgtgtttgtaatgcgccgtgattccactgtagaacgtcgttttatagagttaggccctgaattccagaaccaggtagtagtggagagaggtctggtgccgggtgagacaatagtggtggaaggataccacaaactaagcccgggtgtaaaagttaaggttaataatgccctgttgaagaaagaagacgaagatcaaagtcagacaccggattcggctaagactgaaaagtaattgacgaacataaaacagacgcatatgaaagtaagtttctttatagacagaccggtattctcggctgtcatctccatactgattgtcattgtgggtatcatcggattgacgatgctccccattgaccaatatccacagattacgccaccggtggtgaagattagtgcttcgtatcccggtgccagtgcactgacagtatcacaggcggtagctacacctatcgaacaagaattgaatggaacaccgggaatgctctacatggagtccaacagttccaattccggtggcttttccgctacagtgacatttgatatttccgctgaccccgatttggcggcagtagaaatacagaaccgtttgaaactggcggagtcccgtcttccggcagaagtggtacagaacggtatatccgtagaaaaacaggcagccagccagttaatgactatctgtctgatgtcttctgacccgaagtttgatgaaatctatttgagtaacttcgctacactgaacgtactcgatttgcttcgtcgtattccgggtgtagggcgtgtctccaatattggtagccgctactatgctatgcagatttgggtgcaaccggacaaattggcaaacttcggactgaccgtagccgatttgcagaatgctctgaaagatcagaatcgtgagtccgcagccggtgtgctggggcaacaacctgtacaaggattggatattaccattcctattacgactcagggacgtctttctactgtagggcagtttgaagaaatcgtagttcgtgcaaatgcggatggttccattgttcgtttgcgcgatgtggcacgcatctcgctggaggcatcttcatacaatacggagagtagtatcaacggtgaaaatgcagcggtgttaggcatttatatgcttccgggtgccaatgctatggaagtggcagagaatgtgaagaaggcaatgaatgaaatcagtaataattttcccgacggattgagttacgagattccatttgatatgacgacatatatttcagagtctattcacgaagtatataagactttgtttgaagcattgatattggtaattatcgtggtattcctgtcactgcaaagctggcgtgctacacttattccgattgtagcagtacctatttccctgattggtacgttcggcttcatgcttatattcggtttttcgctcaatatacttaccttgcttggattggtacttgccattggtattgtggtggacgatgctattgtggtagtggagaacgtagaacgcattatgcacgaagagaaactgccaccttacgaggctacgaaaaaagcgatggaaggattgacgggagcgattattgctacgtctctggtattggcggctgtgtttgtaccggttagtttccttggtggtatcacagggcagctttatcgtcaattcacggtgacaattgtggtttccgtattactttctacggtggttgcattgactttgagtccggtaatgtgttcgttgatattgaaaccggaatcgcataagcgaaagaatatcgtattccgttatatcaactatgcactaaatatgggcaaccgtaaatatgttcgccagatttcacgtgtgataggaaatcctcgcagagtactggctgcatttggtgtggtattgatagccatcttactgataaatcgtttgataccgaccagtttcttacctgtggaagatcagggttactttaaagtggaactggaactgcccgaaggtgcgacactggagcgtacacgcaccgtgtcggagcgtgcaatagagtatctgatgttgaatccggctgtagagtatgtgcagagcgtagtgggtagtagccctcgtgtaggcagtagccaggcacgtagtgaactgacggttattatgaagccgtggggggcacgtgacggacaaaccattgatgaggtgatggcacaagtgaaaaaggatttgcaggaatatcctgaatgtaaagtatatctttccacgccaccggtcatcccgggattgggaagctcgggtggttttgaaatgcagcttgaggcacgtggagatgccacattcgataatctggtgcaagctacggatacattgatgtattatgcatcacagcgtaaggagttatccggactgtcatcatctttacaggcggatattccgcaactctatttcgacgtggatcgtgataaggtaaaactggcgggagtgccattggcagatgtcttttcaaccatgaaggcttatacaggttcggtatatgtgaacgacttcaatatgttcaatcgtatttatcgtgtatatattcaggctgaagcaccttatcgggaacacaaagaaaatatcaacctgttttttgtacgtggggcggacaatgtaatgataccgttgacttctctcggaacaacttcctatacaactggaccgggtagcatcaagcgcttcaatatgttcaacagtgccgtaattcgtggtggagcggcggatggttacagttccggtcaggccatggaaatcattgagcagatagctcgcgaacacttgccggaaaatataggtgtagaatggagtggactttcttatcaggagaaacaggccggaggacagacagcaatggtattggcattggtattcctattcgtattcctcttcctggcagcgctttacgaaagttggacagtgcccattgcggtgttactttcattgcccatcgctgcgctgggagcctacctcggagtgtggctgtgtggattggagaatgacgtctatttccagatcggattggtaatgctggtcggtctggcagcaaagaatgcaattttgattgtagaatttgctaaagaacaagtagatcgtggagcgaatgtggttaaggcggctttacatgcatcgcagctgcgcttccgtcctatcctgatgacgtcattggcatttattctcggtatgttgccaatggttattgccagcggaccgggctcggcaagccgtcaggctattggtaccggtgtattctttggaatgattttagctgtgacgataggtattcttttggtaccattcttctttgtactgatttataaggcgaaggcaaaagcgaagagtacgaatattaagaaagttacgaagcgatttaaacgataagttatgaaaagaaaatatacaatatattacatgatggcgttggtgttattgttcagttcctgccagttgggtaaacattatgtacgtccggaactgaatctgccgcaacagcttgactcaacggaacaggacacgctctctcttgctgaccggcaatggtgggaactctacaccgatactacgctgcaagcgctcatagagcggacgctcgaatataataaggatatgaagatagctgccgcacgggtgaaggaactggcagcaatgaagcgcatcgattttgctaatctttttccgcaagtcagtggaaagctgtatgcggacaaggaagcggaaaactatggcggagacaattatgattcagaccggagctatgaagcaaaggcaatcgtttcatgggaagtggatctttggggaaacttacgttgggcgaaagataagagtatggcggatttcttaggttcgatagaggcgcagcgggcactgaaaatgagcttggtggcagaagtggcccaggcatactttgaactggtagctttggataatgaactggccattgtccgtcagacactgaatgcccgtaaagaaggtgtacggttggcaaagcttcgttttgaaggcggactcacttccgaaacctcttatcagcaggcgcaggtggaatttgcacgtactgcaacattggtaccggatctggagcgaaagatttccattaaagaaaatgacattgctttcctggcaggtgaatatccacggaagatagaacgctcggtgttacccgaagaggttaaattgccggaaaatcttcctgtaggacttccttccacattgttggaacgccgtccggatgtacgtcaggcggaacagaaattgattgcggcaaatgcgacagtaggccttgcgtataccaatatgtttcctcgtttggctctgacagcacattatggtttggagagtgctgaattctcggatttcttgaaatcaccttatcatttcttgagtggttccctgttgacgccgttatttgcgatgggtaagaaccgggcgatgctgaaggccaagaaagcagcgtacgaacaggaggtttactcttacgagaaatcagtgctgacggctttcaaggatgcgcggaatgcgattgtagatttcaataagataaaagatatctatgagtcacgcctgcaactggaacaagctgcacaaacaaatgtggagttggctcagttacagtatattaatggcgtaatcggatatctggacgtgctggatgcacaacgtggatatttcgatgcacagatcggattgagcaatgcgatacgggataagcagataacactggtgcggttatataaggcactcggtgggggatggcagtaggagggttaaacctccggtgtattcaggaagaagaatacagacatcccgataagaatgattcccagtacgccatagaataaccgggcacgttttcttcctacactctttacggcgaactgtgtgttgcgggcagtgaaaaaccactcccagtcaaacacagccgccagtaatgagatgatgccggccactacgaatatgccttgtacgatgtattggctcataagatattaatccagattttccattgtcaacttgcgcgaaccgtcttccagttcctcaatagtcactttaattgtgttgccaggcaacagttcttccactagttccggccattcaatgaaacagagtgcaccactgtagaagtaatcttcgtatcccatatcatatacttcttccagcttcttgatccgatagaagtcgaaatggtagatcaattctcctgctatgtccgaacgatattcattgataacggcaaaggtgggtgatgtaacgacgtcttcaacgcccaactcctggcaaagtgccttgatgaaagtcgttttaccggctcccatttttccatagagagcgaaaacagtattgtcccccatagcagcgataaactcgcgggcggcttcatggatgtgctccagagattgaattttaatttccatactatatttaattatgattttactttcagtttcgtccacttagtgtgataagtgggataatcatctcttccatcgaaatgcctccatgttggaaggtatcggtgtagtagctgacgtaatggttgtaattattgggataagcaaagaaatcccgacctgtggcgaagatatagcgtgtactcacgttgggtgaggggaggtgtatctcagaagggcgggtgatttcaaacacctgtttgggattgtatgccatgttgcgtgacagtttatagcgcaggttggcattaatttctttactgttgctttgcacctttaccgggttatctacgcgaatgctgccgtgatcggtggtgatgataacccgatactgacggctggcaagtgctttcagcaagtcgctcagcggtgaatggcgaaaccaggaaagggtgatactacggtaggctgcctcggtagaggcgagttcacgtatcattttgctttccgttcggctgtgactcaacatgtcgataaaattgaatacggcaacattgaggtcattctgcgctaaggcgggaagttgtgccagcagacgttctgcactggaagcatcgtttattttatggtaagagaaagtatcattgcggcgatagcgttctataatggtacgtatcagtggagcttcattcaaatttttgttttcctcttcgtcctcatctatccataattcgggaaaaagcttagctatctggtcaggcatcagcccggaaaagatggcattgcgggcgtattgtgtggcagtgggcagaatgctgaaatagagttgctcttcaatgttgaataaaccggataattcattggcaagaacgcgccattggtcgtaccggaaattatcaagtacaataaagaaaatcttttcacctttgtccagcagagggaaaaggatacgtttgaaaaggtccgggctcatcagagggcggtcggtgttttccgaagagggtttgcgtgtgttagttgcccctttttcgtccgatacccagttggcatagttcttctttatgaatttggcaaaggcagaattagcttctgctttctgcatggcaagcatctcgctcatagggctgtctgtagcttccaattccagttcccagtataccaggcggcgatataattccatccagtcggttgccgtcagtgagtcattgatttgcatgcctatcttaccaaaattttgttgataagcggtttgtgcagcttcgctgactatatcccgacgatgcagattcttctttagcgacaacaatatttggttaggattgacgggtttgatcaggtaatccgcaatcttttgtccgatagccatgtccatgatattctcttcttcactcttggtgatcatgataacagggacggtggggcagatttcttttattaatgccagagtttgcagaccactcagtccgggcatgttttcgtccagaaagattaggtcgtaggttgtagcgcggcagcggtcgagtgcatcctgtccgttggttacggtatctacttcgtagcctttgccttccagaaacaggatgtgcggtcgcaacaaactgatttcatcgtccacccaaagtaatctatctctcttcatatctgttagctatttcagtccccaaagataacaccattttccgggtcgtcctcttccgtaggcagattttcttctctctgtcgttcttcttcctctgtcggcaggttcagcagaggttcatccagtgtatagccttttagttccggttccggtatggaagagaagtgtgtacggtagaaggcatcataatcatcgaaactatattgtttgattaattgcgcatagttggcctccgagatgagtatggcacgcataccactgagccgtgccgccatttcgggatttgcataaagtcgacggaaatactgctgtgtttcatcgtaattgttgaacggacgaatttgcaacataccgataccccgttcgtgagcaaatgcaaggtcgaagttcttaaccaggaaagtggagaaattatagcgtgccacttcaaacagaagcatattctcgtttacttttccttcttcataagcaaggataaagaggaacggtacattgcgctctgtgctgaaagcactgtccggtgggagaatagcggtactgctcgaactgtcgcccaacaagttgcctgcctcggccagttcggcactccgtcgttgccagatagaaccgaatgtatggctgtcacgggccaacagacgtccttcctgtacgcctttcagtatatgggcggccagatcggtgatttcgttctgcggatattgctgtacaagttctttcagagtggcgaggaacctctctgtttctcctccctgcagtcgggtgacggcttcgaggaacataaacttcgggcggtgttgccctaatggatatatttcggaagaaagatgttcggcagcccgcacggtggctgtgtcgcccatctggaaatgctcataagcacggacatagagtgaatcttcgcgttgtttaccatgtacggcattctctgcgaaatccgggtcagccagtgtcttggcataacggctttcggggaatcgggcgataagttcggctttatatttttcagcggaactaccttttttctcataatattctatagccaattccgtcaggaataactgataataggcttcatcagcttgcgcgaagtccgggaattgccggatgagcctttcgaacatggtttctgcccgtcggaaatcgtgcatacgatccttgaaaaccattccggcaccgtataaagcttccgatagcaatgcgttggatgcctgcatggcctcttctgtcaatgggatctgtgccagatagtattccggacgatgcgtatcattggcgatactgtcggtagttccctttttaggatctttttctggggagacagagctttctgttgcttcattttcctgactgttcgggatactgtctttgggggcaatatcttccgattcactgtaatctatttcttcaaaatcgtccagtgcaaccacagtcttatttttccttcgccagttgtcttccagttttctacgtccccacaaacgttggaactctgcttttccctgctccactaattgcggattatagaaataccaatcctgctttccacctattgctggctgggtagtttgtggagtagtggtattcccttgccctggtttgctgataatcgaagttgcaggtaactgactttccgcttcttcccgcatctgcaggcggtttgtttcccgctctgcttcttcggccgccttgcgttctgcttcctcccgggcgatgacctgtgcaatgatgttttctatgacggccattcgttccgcctccggcatcccggcaaggtgctgcaaactatcctgcaactgtatggtattggtatgaggtaccagttcgtccaatatttccgaacgggtggtaatatcggcatattcccggtgtgtcttatctatcaatcctattgcctctgcatatgctttctgcgcttcagcatagcgtgcctgctgccagtacaagtttcctaatgtcagttgaagaattcctttctccacaccattacgggtgttcttttctattcctttgtgatatgcggaaagagcctgcgccgtgtctttcccggccaggtaaacattacccaatgcatagtaaatctgatccagatactcttcgtttttctcgtctttgctcagccgcagtagcttccctgttatcttacggctattggcggtgggcatcacttccgtctggcggatacgggcactcaatgccagttcgtacggagggttgagacgaattactttgctgtatgattgataagcttgttccggttgttgcaatagctggtaagtctgtcccaggagataatagcatcgcgctttttgctgtttgttcttctcgtttttggctgtcttttcaagatgagggatggcttctttgtatcgctgactgcccaacaggtagtttcctgttgccgaagcataagggactgccagtgatagtggtagactatcgttatttacccggttcagagcatcttcagcatcgtattgccaacccagtgctgagtagcagcgggatagccagatcagagcttcggaagtgatattcgtctgtccgtcatagaggcgcacgatataagaaaaggttgaggcagcttccgggaaatctcctttctgatattgtgcttttcccaatagcagccatgcacggtgtatgaaaggattgaactcccgacgagccagccattttttgtattcgtccgtgtatgcccgtcctggtttacgtatggggcgtcgcttgatagaatgttgacgaatagctttttgcgctttttcaatggctcgctcatagtcggaagtaccgatacctgtagtttctttattgccgatgggatagagggggagcatttccatgtagttatccttattcccttgttgctgtgcctgcaatccggctttataagcttcgtttccgttgaagtagacgttgtaacgggtggttagggcatgatagaagcgtgtgccggctgtattctttcgggtagaacatccggcaacgagcatcaaagtgactaagatgcctgtgaggaggattgctttgcgtttcaactatgccaaataagttttacgggttctgcgttttctgccgtaaagataaataaaaactctttcccagcttacatactacgtatataatgatggaaaagaagatgatagctgcgccagaaggaacgttgagatagtaggatatcattaatccgcccaggcaactgagataaccgatgccgatggatagccagataatgcggtggaaacgatgcgtaaacaaattcgcagtcatttgtgggatggtgagcagggaaataaccagcacaatgcctaccatgcgcagacatgccacaatggtcagtgcaatgaacatcatcagtacatattcgaatatttgtacgggaataccttgtgaacgtgcaaattcccggtcgaaagcaacgtaaataatcggacgcaggtataggataaagaaaatagccagtatcactgcaagtcctgccagcaaggcgatgtctccgaatgtaatcgtcagtatattaccgaacagataagcggacaaatcaggggcaaacccgggtgaaaggaaagtgaacatgatacccaatgccatccccaacgtccagaataccgcgatagctgagtcctcacgcatatcattgcgtttgctaagccattccacgccaaaagccgacagtaccgcaaacactccggctgccagaataggagagattcctgtatataatcccagaccaattcctccgaaagaagcatgtgtcagtccgccactaatgaacaccagtcgcctcgttacgatatacgtaccgataagtccgcaaacaatgcttgccagcaaactgccgatgagggcatgttgaaagaaggtgtattgcagtagatccactttaaaatctcctctctcctataatcaggaatatttcatctttgatattgtttggcagagctattccacgtagttgcaaactgcgtacccatccggcaacgtcgatgtcctgcatcgtatagaatacgtccctgaattcatcttcctgttcaggagtgtaatcttcgggggcaatgccgatgtacttgtccagttcttcatcatcgtagtactctatctttttgctgacagcagctaacagactgtctcgttcgcatatttcgtgctgtccgcagcattctgcgtcggcctctttcacttcaggcatggcatccagttctccgcgctctattttcttttgcaagcgttggttacggatgtatcctgccaaaagggcgatacagacaagtgcaataagacttataattaatatccacatagcttattcctctatttcaatcccaaatcctacttgtttcaaatcttcccagtatcccggataagacttggacaccacttgcggatcggcaatccgtatggatggtatccgaaggatggcgggtgcaaatgccattgccatccggtggtcttcataagtcgcaataacgggatgggaggccggttcgcagcgttcaccgttccagattaatatactgtcctgttccgattttaccacatatcccagtttattcaattctgtgataagcgcctgaatgcggtcggtttcctttatcttcaagctctgtaatccggtaaatcggaaaggtatgttcattaaacaacaagtcacaacgaaagtttgtgccaagtcgggtatatccactaaatcttcctttaaacaggtaacgggagttcccatcttagtcagtaccactccttggtcggtatatgtggtgtgtacaccgagtttggcaaatatttcagctccccggctgtcgccctgatagctgtgtgggagaagtccgggtaattttatttccgtttttgtagattcttttttttcattatcctgaattaaggcaaccatctgataccagtaagaagcaccgctccagtcactttctactgtgaaaggtatgtctctgtattttcccggacggacggtgatactactttcagaactccaggcagcgtctgcaccgaattctttcattagttgcagtgttagattaatgtaagggcgggaaatgatttctcctgtaagattcaacctcaatccgtttttcaggatggggccgatcatcagtaaagcagatatatattgtgaactgacatttccggcaaggctgatttcttcgcctgttaattctgtacctgtgatgcgtaaaggtggaaagccttcttttccggcatactctatctgtgcacccagttcacgtaaggcatccaccagaatacgtatggggcgttgttgcatccgttcggtaccggtaatgatgcgtgtacccggtgttacactgaggtaagccgtgagaaaacgcatggcggttccggcggcaagaatgtcgatatgtccgggattcccgtccagtgcttttatcatgacacgggtgtcatcgcaatcgctcaaattgcttggcgcgatatgcccttgggctaaagcgtgtaatatcaaagcccggttgctgatacttttggaagccgggagctggatagtggtatgcaaagtggctggtgccgaaagtttatagcgcatagttgtattccttcttaaacgtaatagcgggtttacaggctacaaaagtacgataaatatctgaataaagaaacttgagttacatgacttctatccgaactgtgcacagattagtttcgtatctgctctgtgtctgctccgtacttactccgtatataatagaggtatcactgaccgaataggctacggagtagttacggagatgacacggagatagtatggagatgacacggagatagtatggagatggcacggagagcatacggagatggcatggagccgttctgaaacgaattccgtcaacgggttatttaagaggtgtgtagaacgtaagtaatatatgtatacgaatatcttttttgcgtaaggaagcttactctcagattatcaaaagcttacaaaatattaattcccagtcgacaagaagttaagagtttgtcgacaaactcccaacttcttgttgacaaactcttaacttcctgtaaatggaaaaatagtatttttttcggtttccttacagtctcaggattacaaatccgattgaatggcggttataacacaaattcctgatagttctctttgtttattactttgaaagacgcttccggataagctgttgcgaaactggtagggacattcgtttttttgtctccccacttgaattcaaaagcggataaaccttcggttgattcttctattagatcaatttcttgattgtcgtatgttcgccagaaatagaattctttggctcggttacgattataagattgcttcattcgttcgctgattaaatagttttcccatagtgcgcccacatcttggcgtacagatagaggggtgaaatttccgatgattgcattgcgaataccgttatcgtaaaagtaccattttccggctttcactacctctttacggagattgcgtgaataggctcccaaacgatacaccacgaatactttggataataagtcaagatatttttcaacagtatttttgctcattcccaattgcttacctaattcgtcataagatacttcactgcccatttggaatgcaattagacgcagtagttccttcatcttactggaatttttcaaaccgtcgattgctaaaatgtctttcaatagataagctcctacaatatctcgtagataatcagttttccgctcgaagctttctagcatcactacttcaggataagaaccatagataagtctagattctaagtgctgtcttgtttccaaagcattttctatttgtgaaatctctttttgtgagaatggagtcagatggaattgggtagatctgcctaccaaaggctcaccggctttgttgagtaggtcgaaagaggaagaaccgcttgcaatgactttgatgccttccacttcgtccactattaatttaagtttggaaccgatttccgggatgttttgtgcttcatcaatagctagcaaatctatcccttctaataaatgcctgtagttggaaatactccgttcatttaatagggcaatcgtatcgtaatcctctccgttaagtaacatggactgacctttaaactcttttatcaactcacgtatgagaaccgtctttccaacgcgtcgtgcaccaaaaagcagaaccgctttattgggttctattcgttctgatattttatcctgaaggatacgtttaataatattcatcacattttgttttgtgacaaatatagtaaaaaaggtctttcaattgacgatttttacgcaaaaatcgtcaattgaaagaccttttttatggttgattcatctttcttcaacgaacactgtatcttttctgaaatcaattggtgatacaccggccctccgtttgaagaactttccgaatgaagactggtcggagaagttgagggtggtggcaatctcctgtatggagagtttggaatgtgtcagtaagttacgggcttcgctgaatagcatttcgaagatgaaatcgctcacgctttgtcctgtcacgagcttcacgatctgtgtcagatgatgggcagataagttcaggcgggcagcatagaaatctaccttatgttcttcacgataatgcgttgccagtagttcgatgaatgatttgataatactttcgtatcgggtcaggcagccgtccgtatgggggaggttggttcgttcaaggatgtcacttaaatcaagataaaaggcgaacaaacggttcagaatgacttctttgtgatagaaatgctctgtacggtcaatattcttattgatgctggctaatcgttcggctaataaaacagcgtaaggatgcgctaaaggaactaccggttggttatatagccgcacaccgtatttggttcgtcggtagatcatgtccgtggagtccatttcatccgtaaaagccttgctgacaaagagacattggcattgaaagtcatcactacattcataaaaatgaaacagatgagccgaagatagaagtaaaagcgtatccgcttgaatatcatacgccttgtaattgattacggtatgtccttttccggataaaaccaataagatgataaaagcgtccagatggatatctgacgaaaactgttcttctgcttcccgatgcccgatagtgatgcagctgattttctttcgtgtatcatttctgctgccactaatgatggggagttcactgatgtttttgatgcgtatggaaggagccattaggtgtgattttatgttgtacaaagataatgtaaacctttgaaatctccaaattaaactaattttgcccaatttgggatttctctccggcaaagaatttatccgacctttacagccgttttgaggtaaatgataatttagcagcgagatgaaaggctgaagtatcttaaattctcctcctcccgggaggaggagtacccgtagggggaggtggtaggtaaaacaataaaatacctatgaataataaaattaaggaatttctttcccacctaccaccccgccctttgggcacccctcctcccgggaggaggggaattgagatagtcagaatatcaatagtttcgccgctaaattatcattttgatgccccctttattaatttaataggtattatgagaaaattgaaagcattatttgtctttatcggtgcattgagcatttcgttggcgtctgcccaaacctttcagaagatgacaattgaagaaatgttcgagttggcagatgctaatagtcgcagtattcgtacgtttcgtctggcagaagaggaagccggacaggcagtaaaggtggccaggaatgctcaacttccttcgattgacgtatccgtttcggcaagttatttgggggatgcctggctggcagaccgtgattttacaaatggagagaatgccgctatgccgcacttcggcaataactttgcaatagaagcatcgcaggtaatttatgcgggtggagctatcaccagccggattgccattgccaaattacaacagcaactggcagagttggataaagaaaagaacaggcaggatatccgctttttgttagtaggcaattacttggagatgtataaattgcagaatcaggctgaagtgtaccggaagaatatagagcaaacccggaaattggtagaagatatcaatgccaaacaatcgcaaggactggctttaaagaatgatatcactcgttatgagttgcaactgaaatctttggaactggcattgacacagattgaaaatggtatccttatcctaaacaatcaattggttacggtattgggtttgccccaggaaacggtgataaatgtggatactaccttgctgggacgacttcccaagccctcggaagaagctcattggcaggaaacggcggtattgagttctcccgtactgcaacagatgaaactgaatatcaagcagtcggagtataatgaacggattgcaaaggctgaacgtttgccgtccatagctctttttgcaggtgataaactagatggtcctattacgattgaagtgcctcccattaacaaaaatctgaactattggtatatcggtgtaggagtgaaattcgatattgcttctactttcaagtcgggtaagaaaattcgtctggcacgactgtccatccagcgtgcgcaagaaaacgacttattgttgcaggagaatgtgcggacggaggtaaaagcggcatatatccgttttcatgaggcttttactatttgcgatacacaagagaaaagcctggaattggcagcacaaaactacagcgtggtgaataaccgctatttgaatgatctggcgctgattactgatatgctggatgccagcaattctaaactgaatgcggagttgcagttggtgaatgcacagatcaatatacttttcaatctctataagttgaagaagacggcggggtgcttataaatcgtcgtcaagtaatttttcatccgcagatgacacggattatgcgggttttatttttctgaaaggcatagcgcagccgtagggactgtgcaatccgcgttatctgcagatgaaaaatgttttttgatatatgaatgtaaactaatgaattaaataagacatggaacgtaaaaagaaaaaactgatttataacgtagtggttagcctcttacttatcaccggactggtgtgggtatgttcccatttcgttcatctcggcaatgtagcctatacagacaatgcacaggtgaaacaactgattgtccccgtcaacagccgtgtacagggtttcatcaagaaaatatatttcgatgaataccgggaagtacataaaggcgatactctggtcttgattgaagattccgagtttcgtttccgtctggcacaggctgaggctgattttcagaacgccatttcgggaaagaatgcggtggccaccacagtacatactactcagaataatatagctgtatccgatgccggtttgcaggaggcaaaagtccgtttggataatgccgaacgtgaataccaccggtataaaaaccttttggcacaggatgccgtcaccaaacagcagtacgatgccgtgcagacaaattacgaggcatccaaagcacgctatgaacttctgcttcgccaacgtcaatctacaactttggtaaagcaggagcaaactcatcgtctggaacagacggatgcaggtatcaaacttgcacaagctgccctggagctggcgcgtctgaacctttcttataccgttatcctcgctccttgtgacggaactaccggtcggaaagaaattcaggaaggacaactgatacagcccgggcagactttggttgacattgtcgatgaaaatgagagatggatagtagctaattataaagagactcagactacccatatccgggaaggccagccggtagaaatagaagtggatgctgtgcccggaataacgtttaaaggtgctgtgaaatctatttcccgcgctacgggtgccagcttctctcttctgccgcaggataactctgccggaaacttcgtgaaagtagaacaacgtattcctgtccgtatagaattctctgccgacaatcgtccggaagatatggaacgcctgcgtgccggtatgaatgtggagtgcgtagtaaattattgatattatgcacgaaacaggacctttttccattccggccatccgtgattttgttcctcctaagttgcgtccctggattatcattgcctttgtcatcgttttccagttttccggtggtctctatttggcggcagtcagtgagatggtcggttctacggcattgatgcaggaagatattatgatggcaggctacgcgtctatgataggcatggggctgacattcgccatcatgtttcgactgaagttccgctttgcttcgaaaacttcattgatgacgtgtagcattgctctgattgtttctaatctgatatgtatgcagacgcatagtattcctgtgctggtgatcacctgtttctttgcaggaatcttccgcatgtgggctacattcgaatgtaattccaccattcagctatggcttacccctaaacgggatttgtcggtatttttctgttttatctatctgttggtgcagagttgtattcagctgtcggggctgataacagtctatacagcattttgggcaaagtgggagtatatgcattggctgattattggtttattgttattggtgatgctggctacattgtgcctgttccgtagttatcgctctctgccgaaattgccgttgttcggtatcgattggttgggggctttgatgtggggacttgtgttgttgtgcatcctctttgtctgtgtgtatggggaacattacgattggtatcagtctttccagatccgggcggcaaccgtcatcggtatacttattcttgcattgaatttatggcgtgcatctttcattcgtcacccgttcattgctttgaagacctggacgtatcgtgccgtatggtttccctttatactatacatagtaatagatattctgctggcaccttcgcatctctttgagcacatctatatggagagtatattagggtatgatgccctgaatgtaatttcgctcaattgggcggtattgctgggaattgtagtgggagcaggctttacctttttcactttttcccgtcgtaagtggcgatataagacaatgactgtgattgcattctcttccattacgggctatctgatgtatttttatttcggcattgactatgctttgcccaaggagacattgtttgtgccgctgttcctgcgcagtttcgggtatgtgataatagctatttgtttccttacagtgcaatctcgtgtcccttttcagcatttctttcaggcggtgtccgtacagtcgtttgtcagtgccggatttggtggggctttgggaacggctatactggggcatgctctcaatggggcaatgaaaaagaactcgatgttactgagttcggtagtggatcatgtaaatcctttcatcagccggatacccgttggagaagtatacggtgctgtgcagcaacaggctctgatggtttctatgaaagaactgtatggctggctcactctgatggctttgttctgtctgttggccttcctggtttacgagagtgatattcgtccatataaagtactgcatcctacctatcgttccattcgtcgttttgtgaagcatgagttgcgtatggataaaaacaggaagctacagtataagttgagattcttttgttcttgtattggatagctttggctaaaattggtagggagaataaggtgaattatcattatttttgcagcctgaaagtggacgtatattccacgaaatgtataagttaagtttatatggtaaaagataattcaaaactgtttattctagtcttattgggtatgctgacggccttcgggccttttgttacggacatgtacctaccgagtcttccgtctatgggagaatatttcagtacaagttcttcaatggttcagttaggactgactaccagtatgatcggactggccgtcgggcagatattcttcggccctttgagtgaccgttatggtagacgcataccgttgcaggttgctatgtggttgtttattgtatcaacgattttctgtttgtttgcgcagaatattcagcaattcgtcgcttttcggttgatacaaggtattgccggggcaggggggattgttatagcccgttccattgctacggataaattttcgggcaaagatctggcaaagatgctggcgatcattggagccatcaatggtattgctcctgtggtagcacctattattggcggagtgtttacggaagccatcggttggcagggaattttcataattttacttgtattgggtgtgctccttttgataggatgtatgcgtttccgggaatcactcccggcggaaaatcgcctggctacgaaatgggcggatacttttaatagtttcaaggtggtgcttcgcaataaacagtatgtctgttatgtgctgcaactcgcttttgcacaaggagtactgtttgcttatattgcttcctcacctttcataatacagcaacattatggttattcgccctttgctttcagcatttgtttcagtattaacgccattgccatcggtggtgcggcggcattttccgtgaagtttcgccggcctgcaaacggaacgctggtcggttgtatgggtatgcttattttttctttacttgaatgttccgctttggctttgggttgcagcttctggatttatgaactgctgctgatagcggttctttttatgatgggaatgacgtttaccacctctaccgcattagccatggagtgtgagcgcacgaatgccggaacagcttcagcactgttgggtgctgtttgcttttcgttcggcggcattgtctctcccctggtaggcattggaaatatcctggtttctacaggggttatatttgttatctgctctttctgttccctttcctgtattttgttggctttaggtagaaggcgtacgaagctttacttcgcattcagtacatcccagaagcgttgaggcaggtgaatgttagacacatccgcagcctctttaaataaaggagcaatctctttcggggcgaatccggcaataccgcatcctatctctgtaacgaggaaagtatattgtgaatgctctttggcaaagcggataaactcatctacataaggtctgatggcttccggcccgccatgcatggtcggaatgccataggtctgtccctgtaatccggttccttgtccccagatggctccccattttttccatgccagataagcggctccgccaccatgcgcgccttccaggttgctgccaaaaacgaatatctcgtccggatgtagttctgtgatacgattagaggtaattcttgttttcatacttttgtgattaggtcataattagttttttcttcttttcttcatttttaaactcttgcttttcagcaaaagtaacctttaggtaactatcttaccagtttgtaacttcttgtttataagtaaaatagtatatagctttgcatcatcggaaagtcactgactgcatttgcgaagttagtgaaaaaactgatgaatgcaactattttataaacaaattaaaagcaaaaaaacaatgaaagaacttgcagtaaagaattacaagaccgcagaaggtcagaaaatcagtcagggtggtaatgaatttacagtgaaaccgattgttgagcagacggatgtggaccaatgccgtgtgaactttgtagaagtggaaccgggtaattttgcctatggatatcattatcacgaaacggacgaagaggtgttctatatcatcagtggtacaggaattgttcgcacagcaaatggggatgtgacggtaaaggccggtgatgcaataactttccctacgggtcctgaaggtgcacatgtcattcgtaacggttcggatacggaaaagttggtttatattgacttcgatacgaataatcttccggagattgtacatcttcccgatacaaaccaggtaatggcttacgggaagttctctaatggggtttatgataagaagtaaggtttttcctatcttcacctccggaagctaaagaaacttgtatactatgggactcttctgatttttattgtaactttgcataatgcataactctaatattggggtatatgaaaattagagaaatgcccttggatgatatcgaccttcttgttaaactcagatttgattttatcagaatttaggtttcatacctattaaagatatcgctaagtaagtgaacataattagttcatattatgataaatgataatttagcggtgaagctattgatattctgactatctcaattcccctcctccagttggaggaggggtgcccaaagggcggggtggtaggtgagaaagaaattccttaattttattattcataggtatttattgttttacctaccacctccccctacgggtactcctcctcccaagaggaggagaatttgaaatacttcagcctttcatctcccgctaaattatcatttatagaacaagctaattttgcatgagcacttatgcaattaaggttataatattaaagatataggaaatatggaaatagatttaacgactccggctctattgttttcggcaatttcattgattatgttggcttataccaaccgttttatgtcgtatgcccagttggtacgtactttgaaggaacaataccgtgaaaatcattcgtcggtaactgcggcacagattgccaatctccgtaaacgtctgtatctgacgcgtgctatgcaggtgacagggacaggcagcttattgttgtgtgtcgtaagtatgttctttatttatatacaactttatcttgtatccatctatatctttggactggcaatggtgttgctgattatctctctggctatctctgtgtacgagatttatatttcggtgaaggctttagagatacatctggatgatatggatgaataatcggatagaatgagtaatcttgtccccatattaggagtgaacaggcaccgtctgttgattgacggtgagggggtgaccacattggtggcttttcatggttgtcctttgcattgcaagtattgtctgaaccctcagtctctatccgatgattttgatttcccgctttattcctgcgaacaactgtatgagagggtgaaagtagatgaactttactttcttgcaactcgtggtggtattacctttggtggtggtgagccttgtctgcgaagtgaatttatcagccgtttccgggaactttgtggaaaggagtggaggattacagtagaaacgtctttaaatgtaccccggaagcatctggagattctattgcctgtggtagatgactatatcgtagatatcaaggatacgaatgatgagatctatcaaaactacacaggcagaagcaatcatcaggtgctcggaaacctgcgttggcttatagagcacggaaaagccgaacagatcacagtccgtatcccccttattccgcagtataatatggaggaggatactacgcatagcatagatttactaaaatctatgggactgagtcattttgatgtatttacgtaccgaacttaaaaattacttcttatcaggctccgtccaacggtcataatgtacattctccggtttccatttatctttcggaagtgggttctctgccggataaccgatagggattacattcagaggaacaatctgttcgggtaattggagtattttctgtacttcttttacccgttcgtctatgggataaacgcctgtccagacagctcctaatcctaaagcttgtgcagccagcaacaaattctcactggcggcggaggcgtcctgtacccagtactctatacccgcaccactgatagctttagttaaatctccgcatacggcaatagccaacggagcgtctttgaccatcttggcgtaaggaagagtagaacccagttcattcatcgtttctttgtctctgatgacaatgaaagcccaaggctgcctgttggttgctgtaggagctgccatggcagcccttaacaattgctctattttttcatcttctacttctttcggctgataagagcgaatactggttcttgcatgtatgttgtcaagaaccgaaagtttattatcctgtttcatggtaggttcctccatcttattaagttgattgggtttcggttggatagataatgcagttactactataaccaaagctagattgaaagtgttcagcgcatagtgcattgtttgctctttgggccttttagaaagatatgagatgattagggtacataatgcgatgcctgccagtaatcccaggaagagtatccagtcgaaactgaaagcacttgccggtttgtctgccgaatgctcctttgcatactccatggccttatgtacagactggataatggctacggaagattctgtggctccggatattccatccacttctttatggattgcttcctctggtgaaagattgctccactgttgtaacagactactgtttcgtactttggcaaagtagctgggtgtttcggagttttccagagctactacttttagaatacggttatcttttatatagatttccagaggaacatttccgccgtacccgttaatatcttttgttagttgccgggtagatattatctgtactccgtcatctgtatgtcgtagtatcccggaagttcctgtttggctttctgttgtattttcgctttcagaaagaatgttcccaaacttgtttcccttgcagatggtgactgccagaaccaggaagaaacaggttatcaggctaatgatgacttgggcttttaatgttttcatatttagctgctatttatagtgtatgcaaatttaggggatttttgctgaaaatagcaagtactggctaaaagtttgctaccagaggaataatgtgtatatcctttgtaggctattaggagagtggatttgaaaagctatatttattcgtcttttgttgcattcagttcggctaattctttgttaatgcagagcatatctcttatcttatcttgggtaaaatgaaagatgaagtaatctaaaatacaggacaccaatagcattgctcctatcagtatataatttaatagtgtgccgtagtaatggagggagatagcgaaaaagagaataatacttgcgtaagatattatattgattctattataaagtaatcgatacctgagtatatgctgtatctgtttctccagatttgtttctgttgcaatccttttgatacttttcaatacgcaactttgcatgaagagtgcgcttaatgttattatgaaagcacctatacgtatagataacggaatgggggattgagaaaaagtaaataaataaattactacgatatttactaatgcgataagaacccagattgttttctccaatctttgtatctttttcaggttactttccttccggtttgccaatacttccatgatttcttccggatgtataatttcattctgaatgactttgtcattcaggctcttccatgctttttgtaattcttccagtttcatagcttgaatattagatatcagacatattctttagtttttccttgatacgatgtaacttaacagccacctgattgcggtttgtgccgataatctcggctatctcatcataagacttttcctccagccacagcatgatatacattttttcttctttatttaactttcggatgagtgcgtacatatctttcaggagctcatccttctcacagtcttcaagtacatctatgctaagatcgagaggaacgaaatggtagtttctctttttcctcagatctgttatgcaagtgttgagtgagatccgatatacccatgtgccgaaagaacttctacctttgaagctcttataacttttccataggttgtagatggtttcctgataaagatcgactacatcatgctgattctgagcatacatcaggcataccttatagatgatatgtttatattgcaataattgatctatgaattcttgttcaatattcatgtaaaggtgttttattggagtatcttgttaataatatggatatacctaataacataaaaggaatactcaatatttgccccatatctataggtaatgtattctcaaaatcaacttgccgttcttttaagaattctatgaagaatcggaatgtgaatatcaaagttatgcataatccgaaataaaagcctttcttgtagtttcctttttttcgtttcgctatggtaagtatcagtatgaaaataatgaaataagcaagagcttcatataattgggccggatgtctgggaaccggacttactctttcgaaaatgaatgcccagggtacttgggtcggtataccgataatttcagaattcattaaattggctatacgaatgaaaccggcggctaagggggcggcaatccccatgatatcaagtatatcaagataatgtattttagtttttcgacagaagagtagtagggctataattaaacctaatgtgcctccatggcttgctaatcctgcatatcctgtaaacgtccagtctccgttgggtaagaaatgaataggcaatatgatttcccagggatggctgaagtaaaattcaggatcatagaacaaacaatgccccaatcttgcacctgcaaatatgccgatgcaactgtatatgaataagtttagataggagtcaagaggtaacttcttgtattgatataacttataaacaacctgactggctgcccaaatagcaataaaccaaaatacgctgtaccacctgaggctgaatcctcctatactaaatagtatcgggtcaggattccaatttataaaaagcaaattcattacctataattttatagtgtcaatttgacgacttgttgttatgttagtcgaaaaagaggtgaggatagttacagaggcaatgaatattttgctttattaagatatggtttcaggtagaatggcctatgggaatgtctttgttcgtttatacttttttcttgtcgggttatgaatcagctacaggctacgagttacaagctacaagtgcctttcggaatatagcgcagctacttgtagcttgtagccggtagctcgtaactgtatgaacttaaaccatagttgcaataatctgaataaacagtatgaggaataccattgcaataggataaaccgtagcgtaagccacactcggaatgttgctgtcagtcatagaatcagctgctgcaagtcccggagtactggtcataccaccggtgatggttcccagtaagtcgagtatgttgattttgaatacaaacagtccgacgaacaccgctactaacataggtaccagcgtaattgcagcacctactccaaatagcaaccagccgctttcctggaaagtcgctacaagattggtgcctgccgaggtgccgacttcggctaggaatagcaacaagcccaactggcgtaataactgattagcaggtccggacatagaccatagaataggacctgtcttaccaattgcacttaaaaataaagccacaatcagaataccgcccgtcaatcccggggagaaagataaaccaccggggaaagttatattcagtttaccgaacaatacgcctaaaacaatacccattgcgatagggaagaagtctgtgtctgataactttttagcgttgtttcccagcaagcgagccaatcctttgagtccttctttttcacctaccaccattagtttatcaccgaattttaaagtcagatccggcgatggagacaggtcgataccgcttcggcgaacacgtgtgacagtacatccgaagttcttcatcaggttcagatctcccaattgtttattgatcatatcctttttggtcagcaataaggattcgatctcttgcgtgtctaccagaggtaattcgccctcttcgcgttttcctactaaaacagaaagctggttcagagcttcttcactgcccactgcctgtatataatcattttcatgtagcatcgtttgtgctgtgggaatggaaattctttcatcatgtttatggcgtgaaataacagcacctgtcatggctcgtgcgttgatttgcatcagactgcggttgaatacggcgggattggtaacacgatagatacaggtcgtcagttcgggaaattggccgcgacgttctttttccagtcgacgggcctccttgtccaggtcaatacgcatgatacgggggagcagttttacaaacaagataacacctataaccccaaacggataagcgataccataggaaatggatgccaacggagaatttgtactgtcgatggctacggcaagtcccggtgtactggtcagcgcaccggctatcaaacctaccacactgggcgtatcgatgtcgaataggtatttgagcccgacagctgtaagagaagccgagcagataatcagcatggtaattatgatcagagtctttcctttgcttcggaacgagtcgaagaaaccggggccggcctgaataccgatagtaaagataaaaagtaccaatccgaagtttcctaattctttaggaatgactacaccgaagtgtccaaagagaagggcaatgaaaatcactgcggaaacatccagtgataaacctttaattttgatttttcccagcatgaaacccaatgcgacaatgaggaagagggcgaaataggaggaattaagtaggtcagcaaacatgaatttagattatttgttagttttcaataattcttctaccgctattttcagctgtgtatcttcgccttttacaattgtttcgggtgagttggctactttaatatccggttccaactgagtattctccagataactgccatcaggcaggcggtaaccaatcacaggaataccgaataccaaggtaggatcttgcaggcgttcccatgatacactggtcatagtgcccgggacaggcatgcctaccagcttgcccagtttctgatgactgtatacccacggtgtgccgtgtgcattggaatagttggcttcgcacgtcaacatgatggatggtttgttccagcggcggctgggcatatcgcaggcttcacggccgcgaaccacctgtgtgaagtatttcttaccactgaacagtatctctatatcttcgtgcaggcgaccgcctccgttgaaacgtgtgtcgatgacaatcccttcacaattattgtattttcccaagatatctgagtagatggaacggaaactgtcatcacccatagacttgatgtgcacgtagcccagtttgccgttcgaccatttttcaacatctgccgcacgttgttttacccagcgttcgtagagcaatgcgctgagttcactgtccttgatggggattactacttcttcccaacgctctttcgttttaggattatagagtgaaacaagggttttcttttttaccttgtcattgaggagcacgtaataatcagtttcaggagtaatctctttgccgtcaatcttttcaataataatgccggctttcacctttgtggtagccttgtcgaacggacctttttctatcacttcggcaatgagcatccctttatcctggtagttccagtcgaaaagtagccccagactggctgtaggctcactttgtccatccggatagaaacggcctccggtatgagagacattcaattcgcccagccattcgcttaaaagttcggagaaatcgtaattattattgatgtgtggcagaaacttacgataggctgccgtcatggcgtcccagttgactccgtgcatattggtgttgtagaaacgcttttgctgttgcttgtatacatgatcgaacatatactcgcgttcggctgccagatccagttttacttgagcaagatatttaataggttttaagtcatcggaagccatgttcatcttctgcatattcttaccgttcagaatgaagagagtttttccttctttatccatttccagagaagtccatccggcatctactttgtggagtagcttggtttccttcttgcgcagatccattttccataagttacgtccgccttcggcgcttgccaggtaatagagggttttgccatctttggagatgagagtacttcccatattcgatgagtttggtgtcagacgtacgatgcggtcttctatgtttttcaactctaccacgacatcttttaccttactgctgtctttatcagctatcttcttccggtcggagtttgcttctttatacagttcgtaatcctctttgctcagactgaatttatcgtatgcatcctgattcaggaataccagcatggcatcgtccagagaaccccatgaagcgtgtgcacgcataccgtagcgttcggtaatgaaaagaatggcattgccgtcgagcacgaagctgggtgaaccgcttgtgtatccgctattagtcagattgacaatctcgccattgccttgtgcactgaccagacctatatccgagtatggatcgtgcttgtttccgataaattccaatgtaaaccatttgccgtccggagaccatgcatagtcaaatcctccgcctgtgctgtaccaggtagagccatcggtgatccggcgtactttcttggtctccaggttgagcaccatcaggcggttacggtcttcaatgaaagctaactccttaccgtcgggtgagaattgcggatgtgaacgttctacggtggtagagggtaatagcacctcttcctttattaaagttgcgttcgggaaattcggatcttcttcccgaactatcttagccagataaatctgccagttgccattgcgttcactggcgtaggccagcgtccggttgtccggagcaaacgagagaccatcttcttctgctgccgtatgtgtgatctgtttagtcgtggcatagtccgcagatgtgacgaatacttcaccacgtacagtgaaagcaatctgtttaccgtccggtgaaactgtagcggaagttgctttatccggatatttcagataggctatttgtggctggtcgtcacgaatgatttctatatttatcttccggggattcgagccttcttgttgggtataaatctcaccatcgtatccatagcacaaggtgccgtcgttactcattgaaaggaaacgcacgggatgggttttaaagctggttattgtttttatcgattggggttgcgaaatcgggaaagaatatacgttgaatgagccaccattacgttcgctcaggaagtagacggtttgtccatccggtgatactatcgggttgcgatcttcgcctgcatgctgggtaaggttggtgtgtgaacctgttttggtatcgtacatccacacatcgcgggtgatggaagaagtatggtgctttctccattcattttcacctcccttgcggtcctgatagaaaaagcggttgccggacttatcaaaacataccgcttcggcaggggtgcccagtacttgttcggtgcgtccgccgactgaaggaactttgtagagttcagtcatggcggctgaaggaaagagagcgctgcctgccggatcctgaatagatgctgagaataaaatatatttgccgtccggggtaaaagtagcagggacttcattggttgaatgagtagtcagtcgccgggctgttccgccatttgccggcattacaaaaatgtcgaaatttccattcctgtcactggcaaaggctatctgtttgccatccggtgaccataccggggtacattcgtaagtgtcttgtgtagtgagctgtgtagctgctccgccctcggttggtactttatagatgtcccctttatagcaaaatacaatttctgttccgtcgggtgagatttgtacatcacgcatccagagtggagccgtcgcatagctggttattgccgtgaaactaaaggcaatgtaagcaagaattttcttcataagtatatttaatgtgtttttatgcaaatataggtaattagtccgtaaatatgaaaaaaagtcattactttcccttactctgttcaatcatttggtatctactgatacgatttttgctgcttctacaaatgctgaaatcaactttttacaatataagtggtcttaaagtatatgaaaataggattgtcacctactgttattcaggtttttggctaagcaattgaattgattcagtaaactcaactataatctcagataattcaggattgtcattacgaagaattattgttgcaaagttcacaacaccttccgcatcgacaattgaggatgaaatcattgtaaaaagtgcttttcgattataagtggaaaaccaatattcaaacaagcggctatgcatacgttgtttattatcaccggtctcacaaatatatagtaatgtagaattattacatctaaagaattcatcaacaatagaaactatagtatcgcggactttacgatcacggggagatttgtgattgttgatattggcaatgattaattggtatgaatttttggataacaagacatcatcttccataaaaccgacagaataatgcacaccaccatctgtaaagaattgatagaatccgttctgttcggtcggttctacttgatagggagtttccccactattaatatgttccaatgaaagatgaagtatcatagagcaaagaatttttcagcctctttacccgttcgttctttatatgtctctttcattgatttttccaattgagcaagacattttcgttttttctctctcgcagcttgaaacttgtcaagagcttctttttttgtaatctttgtttttgccatatactctatttctcctttctacttgcaaagataacacttttcgttgataatcatttgtttcataattaaaagtagggtttgcgtaaataggggtagcggtttgcactatggtttacaccaatgggtaattttcgcgtcaaccacagcgtcaaccacaccattaggtggaaactcgtaaaaaagcaaaaagcatcgataaccttgcgattatcaatgctttatcggtagtcgggatgacaagattcgaacttgcgaccacacgccccccagacgcgtactctaccgggctgagctacatcccgaattgcggatgcaaaagtagtgctttatttttaaatagcaaatatttcagttgatttttgttttgctattatcttgttagataacacatctctcttattcttaatttgttatgatggaaagtttattctatttaagtttcgcatgtagcctttcagcctacatgcgaaacttcagttttattattttagatttttatcggtttgacttaaccgattgagaaataaactattagcgaattatttgagaaatagaggtaacgatttggcaactgtgcgaatttcagcgttttgcgttgtatgctgtcaaataactctttcatttgcaaatataacatctttttccgaaagtacgaactgttggcagcaattttataaaatcaacttgcgaaaaacgaaaatcattcatcccatttacaagttggcatgttaagaacattgtccgctttgtcattttgttaccgggatttgtccgcatggtaggagaagcgtaccaatcagtcaagtatgttgtttcattatgtaatagccagctgttttttgtgtaatactccgatatcgctttctttttgatttcataagaaagcccccagcgaaaaccctgccggaggctgtttttaatctaatacattttcgggaatatcagttgcttttcttgttagataatattctgtattggtttctatatctgttgctctcattataataggtgctatttcttttgtctttggactttcgatgaaatcgtgccaatcccagcctaaaaaagttttacaacagcaaacatagtttggtctgttcctgttagattatatttatatatggttctattctccaattctttatgataagttaatgttaagaacggaatatttccctttatggaaaattcataatttcctgtactctttatctttaatttatcatcgtacaagtagaaatctttatcgtcgttatttattaagaaaatttcatcaccttgcttatatggtgggcgtacagggttgttaatagacaaatgtaaataactatctactatctttattcttagatcagttgtttcatgtgcaatattgtcctttacttgaatagttgtttctcctttttgtttaggatatatatctaaattacccataccgatagggcttgataaatctattttgacatctaatatagagggatcttttatctcaacggagtaatctttatttccacttcgtatcattatacttttggctccgattagaggacgctcgtagtaatctttttcaaaagatagatgatgtatatcttctgttttttcatcatcactgcaatttgtaaagcagaagcatagaaatattagaaaaaaagtaaataagtttttgtttctcatgactttagtacttttattttgatttatagttccgtattttcatatttggggtatcaccaacatttactacagatgttgccgtttaatataatattcggcaagctgtttttatggtgtaacgctccgatatcgctttttatatttatttcgtggagatttttctttgttcatttgataccaaactttacgttgccattcatatacagccagtttttcatcatcaacattatttgttttctctatataacttctaatacttggagcataagggtacttggactgtattatatcatctaccaaatagccattcaatcctttcaaattattgaataaaaatccttgaaacattaggtttatatagtctttattcttatgtagatattgtttgtatgctttgtatgcatcagatttcatatagtctgttgctctactactgaaatttggcttttttagttcttcttttaaagccttttcaagtttcttgtattcggtagaatcttgtatgctataccaataatgttcctctggtttgcttattaagtctatccatgctttggcttcccaatagtcaatgttcattcttacagaatctctttgttctggagataattcatagtataaagaatccttttcccaaccgttaaaaacgacttcaagagattctgacttctctctcattatacctttgtagatttctagcagtttttggtctgaaaaggacgttatcatgaatgtaccgctttctattctgcaattaacttgcggagcagtaataatggaatcattaaatacaaatgctattttttccccaatagacttttctgtttcatcggcccatttgtttagcttatgtttgctgatttgtccgcttatagcatattttccgaaataatccttttcaagttttagcccaacgaaatcctttactgttatgattggcttagaggacaaactacctgtacttaatacgtgataccacccattttctttatgcgtaaaatcgtgttttgccgtatttggctgtgctttcattcttggtgaaaagaataaaagtgatataagactgaataagatgatatttgtcttcatattattttgatttatttgaaaaatagcatataacatactatcgctaataaaaacagaagcaatatacttgcaataaaatatatttttgctttgaataaacttgcattatcaagtgcttctttttctattgttcttttatgaatttcttccatttgctcaatagaaatattggataaatcatttcctttacctttgtttacaagatacttttgatgttcttttattctatctctgtttaatttacgaagttcacgattttctttatctcgttgtaacatatcgtttatgcagcctaatgttcccatagcttttaaatttatagttctgtattcacgtatatttttccgaaagttttttgctcgtcacgtatccggcatagctcccgatatacttttaggtgcaaatatagcgaaaagtgccattcataagacatcatgaacggcacttttttattgttttcctgcaagataaacggttatatcttcattcctctgcttttcctttgcggttgtataggtcggcgaatattctgccttagcttgtcgaactgttccttgaaccactcggcaattggctttcggtcaatggcaagaaccagtctcgtcccgtccgtggggtctttcacgacttgaaaccctgccttttcggtcgtgaatttccgtccgtgttcttccgaatagagttcccctgcatactccaacggctttcccttgacgagcgttgcggtctgcctttcatcgaatcccacaaggcggcaaaggttttcgattcggagcatttcacggaaatagggaaaccatgccgccgcctttgcgattaccgttttcagaaacgatatttcctgcttgtgccttgtgtccttgtctgttatctccctgctgtgcttctgctgcatttcccgtatttctcggctgtggtctgcctgcatggtctgtatcctgtcttgcagggcttcgatggtttcctcgtggtcggctatcttcctatgcagggcagtgttctccctctccaacgccttgaccttgttactgccgaaaagagaaccaacgctctcggctatgttggtagctgcggtggttgccgcccctttcagcttctcggtctgtatttcttttttcgcccgtcttagttcctcccgtgccgtttctttctgctgctgcaaatccaccacttccgctttgaggttgtcggagagtttctgtatatcccgataatactgctgcgtggacttgtggcgagccttcgagccgtctatgcccctttgcaacccgtatttcgccatcgcttcggcataggtatcttggtaggacttcaatttcagccgtgtcataatatcgtctgcgcacagcctcacggtgtcggtcggctttttgcggtatcgcttcttcgtctgttcctcccttttcctgcgcttacgctctcccttgacgatggggacgagcgtaacgtgtatgtgcggcgtttcctcgtccctgtgcaggtgagccgccacgatgttctcctttccgaacgtgtcggcgaagtatttcagattgtcggcgcaccactcgtccaaacgcccctcttcctctatccgcttcatgtcctcgtgcgttcccgatacgttgatgcggattgcccgtacttggttgcttccgattttgcgtgtcagcccagcttcttccaatctccgctgtatagccgccgaacggcctttcactccgtcggggtattcgatgagcctgcggttcaggtgcgtgcgtgtggggtcggcgttcttcggtatgatgaaacgctcgatatgtgcggtcgttccgctgtcgctgccgtgcgccttttccatgtgtaaaactacgaaacccatatattcttcctttcttttttggcttgtgaaacaatgatttttttgtatcttcgggggcggcaaatgccgtccccgatggggtgtgcagaggggcttgccccttgccttattggggaattttcagcgatacgtagtattgcggctcggaaaattccctaataagctacggtattttctccgtaaataccctgcggcgtgccgtccgtctgcccgtctgcctttcggcggtggcagtccctgccgcctgcttacccgtataaccccaccttattatttttccctttcggtcggtggtgggcggcggggcggtcgtttccgttttcaaaggctcttttgcacggggcggtcggatacaaggttttcccgataaatcttcctctcgcttcgctgcgagcgtatttatcgggaaacggcgcagccgcctgaccttttagccgacataaagccccgtgcttactttgcctttgtaaacggaaatgattgctccgctttcccctgaaaagaggaattgaacctgcaatatatatcaccatagtgataggtttgcatgtttgcatgctggtatgctggtacgtttgcatgttgatatgttggtatgttgatatgttggtatatcatcatgctttccaacggctgttgggcttgccgtccgaaacaaccgacacgaataccgtcgttttctcttttcgcccgtgtataatcctctctaataatgccctgcggactttcgccgccccgaacgattcgatacggaaagcgagggcggctatcgtttcgaggttgtaaacctccgcgctgtatctgtccgatatgcggataatgcgctttatgtcatatatactcaaaactccgcttttgcagagtgcctttatccctgcccgaaccgtcggggcgataaccccgaacagttcgcagatttctcgctcggtcatggcggttgcgcctatatcgctcggcagggagatattgccctgcccgtccatcgtgataatgttcctttcttctttcatcggtattctgttcttaattaaatggctcggcagatattcttctccatatcctccaacttgtgcgacaaggtttccatgtcttggcttatcttctgggcggtgattttggcgtaaatttgggtggtctttatgttcgtgtgtcccaaaaggcggctcaccgtttcgatgggtacgccgtgcgacagaagcacggtcgtggcgttcgtgtggcgtgcgacatggtaggtcaaacgcaccttgaagccgcattgtctgcctatatctttgagtatcttgttacaactgccgttgctcggaacggggaaaacatgaccgtcccttgccagccccttgtatttctcgatgatacgcttgggaacgtccaaaaggcggatgttcgattcggtgttggtcttctttcttcgggtgattatccacaggttgccgtcgaagaatgtttgcaggcggtcggcggtgaggttcttcacgtccgaatacgccaaacccgtgaaaacagaaaagacgaacaagtcccgtacaagctcgtgggtggcgttcttcatcggtgcgtccatgagcgtctgtatctccgtttgggtgaggtagcccctgtccacgctttcgggagagttgatatatcccgcaaagggattaaagggcaaacgcccgtcgttcctcgctatggaaacgatgtgtttcaacacaatcatgtagccccacacggtattggtgcggcatttcttctccgtgcgcagaaaatactcgaagtcgttgatgaacgtgaggtttagttcctttaatggaatatcctcacgcttgtaggtatggggcaggaactcccgaatatggttgcagaccgtccgataacgggtaaatgtaccctgcgccctgctgtgcccgactttcttctcgaactcggcgttgtgctgctcgaacagcttcagcaaagtttcctgcttgacgccgataccgagataggcgtctttgagtttggcggcggtaacataaccgtccgtctgcattaactcttgatagcggcggtttacctccacacggattttatctactgcaaggttgattctctgcgcttcgacgctcttgcccgaagcacggctgttcttcacgtcccacaagcgtgggggaacgtccatcttgcaactgaactgtttaatctcgccgtccaccgtgatacggcacatcagaggcaggttgccgttcggcttctcgctgcctttcttcacgtaaaataataccttgaatgtacttcgcataactcactcctttttttggttacaaaattagttcttagtgagttaccgacagctatgtaaatcaacgcaaaacgcagaaaaagaaccttttagcaagaaatttgcacccattacgggagtaacgaggtggtaactgaacttctgcgccgtttggcttcgaggtggtatttcgttggctctgtcccatagaaaaacaaagcgtaacgaacgctctatcagctaattcgctacgctttgcccaaatttactttttcgctatgtgtttattttagaaagtatctgtcgattcttctttcaccctcttcagcaagttttctacattttgagagtggtaatataagataccttccaattgtttcagaaaacctacattgcttgccagttgcgtaatgaattgcagatgcagaccgatttcccggttggcttgcagcaacgtcttgtgcgggagtgtactttgcagcatatagaatccgctggcatcttgtatttctgcaatgccgtttccccattcgtgtgtacctaacaattgtagaacatggatgaattgtcttaatttgcgtttcagacattgcaggcttatatattccgaagattctttgacatacgcgatgttcatgatgtcaatcagttgtaaatagtacgctttcatggcttcttctgaagggaagcccgtgcgtgggtgcattgctacgttgggtaattcctgagcggttaccggctgagtgttgttttccataaatcgttaagttttaaaaggtgaataattcgattcatgggagaggagaagaattcaaaaaagcaatccctgcctgtcccattgtcgaacacctaccgcgcagctgttggaagtgcattaacactcccgatgggggtgcagggaccgccatataggagtggcgtgaacgggcataaaaatgcccgccacgattacttggcaggtttccctgctgcacgataaaaaatggttcgacatcacaaaggtacaataaaaaataaagtagcaatgtaaatcggggaggaaaatacatctgttctctgattaactttattaatgatgcgaatcagaagttgaaattcacatgaataataccgaaataaaggatcgatgaataaaactgatcttcggaaaggtatgactgcgaaaaaaacgctgctctgttctgaaactttagagaatcaatgtattatagtctctctgaaaatctttatctttgcggacagtttgaaaacagaagtgaataataattgatacaataacttaaaacaaccagaatcaaatgaagcaggatatgattgttatccttgacttgggtagtcatgagaatacggtattggctcgcgccatccgtgcgttaggtgtatatagtgagatctatcctcatgatataaccgttgaagaactgaaaaagttgtccaatgtaaagggcattattatcaatggtggaccgtgtaacatagtagatggcgttgccatcgatgtgaatccttctatctacgaggcgggaatcccagtgatggctgccggtcatgacaaagcgacttgtgcggtgaaactgccacagtttactgatgatattgaagctatcaaagcagctgttaagcctttcgttttcgaaacttgcaaggccgaagctaattggaacatgaccaacttcgtgaatgaccagattgaattggtacgtcgccaggtgggtgacagaaaagtattgctggccctttccggtggtgttgatagttccgtagtggcagctctgttgctgaaagcaattggcaacaatctggtatgcgtgcatgtaaatcacggtctgatgcgtaaaggcgaatccgaagatgtagtagaaatgttcggtaatcagctgaaggcgaatttgatctatgtagatgttaccgaccgcttccttactaaactggaaggtgtggaagatcccgaacagaaacgaaagattatcggcggagagtttatccgcgtattcgaagaagaagcgcgtaaactggacggtatcgacttcttaggccagggaactatctaccctgatattgtggaaagcggaacgaaaacggccaagatggtgaagtctcaccacaacgtaggcggtctgccggaagatcttcagttcgaacttgtggaaccgttgcgtcagcttttcaaagacgaagtacgtgcatgtggtcttgaactgggcttgccttatgaaatggtttatcgtcaacccttccccggtcccggtctgggcgtgcgttgtctgggtgctatcacacgcgatcgtttggaagctgtgcgcgagtccgatgctatcctgcgtgaagagtttcaacttgccggactggataagaaagtgtggcaatatttcaccgtggtacccgacttcaagtcagtgggtgtgcgcgacaatgcccgttctttcgaatggccggttatcatccgtgctgtcaatacgattgacgcgatgaccgctaccatcgaacaggtagaatggcctgtcctgatgaaaattacggatcgtatcctgaaagaagtaaaacatgtgaatcgtgtttgctacgatatgtctccgaagcctaacgctactatcgaatgggaataaaagactttttgctaaatagctagcgcattaagtcctttcggatacttcatttaaagatactttccgtatctttgctgtctctcttacaaaaggtggcatcttttgctgtaaaagatgccatcttttgtgttataagatgccaccttttgctacaaaagatgccatcttttgcatggaaggaataagggaaagatatcaaaggtagtaattaaaaacacgtaaagactatgggaatgatttacttggtaagaaagaagctcttccagactaaggaaggtgcaaaacaactgtattatgccgtgcaacgtacgctgcaaccccgaggtggggtgaccgaagatatactggcaaaacgaatcgctcaccggacgggcaggagtgaaggtgatgtaaaaggaatattaaccgacctgcctcacttcatagaagaggccttgaagaatggggagtcggtatccatcaaaggactgggctctttccatattgcgataaccagcgagggctttgaacaccccgaagacgtgatgccgggaaccgtgcgcatttcgcgcgtttacttcaccgctgaccgcggcttgaccagggaattaagcagggaaatgagatttttccgctatccgctgagcaaatacttcccggcaagtatgttgagcaagaaagttgtggaagcggaaaagaaggcggaactgcaaggagaatttccggaagaagagattactgagaacccctaaagaataccccttccacactctatcccctatgaataaagggttgcagacgtgtggaaggggaaatagtacaggtacacagtgaggttatacccccatgcattcccgataaaaatcgaacatttcgtaaatggtatctttgtcggcagtctggttgaggcagatgtctccgacttctttcaatagagtgaagttgatggcgccggcagtgttcttcttgtcatgcttcatcaactcataaagttggtcgtactgtttgcaattgaaggccaagccaccgtagttctctttgatgaactgaatggtctggcgcattttctctttcggaaaacctacctttatataagaaaggtatagctcgcaaacaattccccaagcaacagcataaccatgtaatacggggcgaccttcggcaagagccagactttcgaaggcatgacctacggtatgtcccaggttcagcgccttgcggatgccgtgttccagcggatcttgttccacgatatcctcttttacttgtacggaacggcccaccattgatttcagtgcaacgtaatctatcttgtccgtatcgaaagccaataattcggcaaggtgctccggggtactgataagaccgtgcttcaacatctcggcataaccggagaagaagttgtgggcatcgaggctgcgcaggaactccgtttcaagaagtacactggcggcaggtgcgaaaacaccgatttcgttcttcaacccgttgaagttgatacccgttttgcctcctacggaagcatccaccatggccagcagggtggtggggatattgatataggcaatgccccgcttgaaggtagaagcggcgaaaccacccaggtcggtcaccatgccgccacccaggttaatcagtaatgaatggcgtgtagctccctgttcgctcagagcttgccaaacggaagcgagggtttccagattcttgtgtacatcttcggcaccgataacgatttcggtagcctctttcagtgccggaatgtcattgagttgcggcagacagaggcggtgggtatgctcgtcggtcaatatgaagagcttgtcatggggacaattcccgatggcgcttgccaggctgctttccagtttctcgcaaaggattacttcttgtttactcatctgattaattacaaattacgaattataaattactgattgtggattctaaattatgaaagagatggataccttctttgttaattgtggtacaaagatagctcttttggcaataaaacgttatctttgcccatcgaaattcgatgggctgacatgatgtttctgccatctgcccccccacaatctataatttataattagtaattcgtaattcgtaattttaaaatgagagcattactaccggtttattgtcgtctattaggatattttgtgatagctttggcactgtttcttccgttcctgatgctgatgctggggaaaatgacggattccaacctcttgttttataaagaatgctctaagctgctgatgatgcttggcgcattgatgattctgtttgcctataccaagaacgagaataaggaaactgagaaggtccgtaatacggctacacgtaatgctatgttcctgactatattattcatctttggcggtatgctttatcgcctggcgaaaggagacatcatgagcgtggatacttcctcttttctgatctttctgatactgaatgttctttgcctggaatttggtataaagaaagcggcagttgataggttgtttaagcgagatcgtcgataattagaacattttatttaaacctcattaaacttttccattgaaagcttgtcaaatgaaacagtataaaaacagacattttgtttcataaaaaacaggcgcatgaaaaaagtaatcatcggaacagtgttattgttgacaaccgcactttccgctttctcacagactaagaacattaccgtagcggggcgtgtcatcgaggatgacacgaaagagcccgcagtacaagccacagtacagttactttcgttaccggacagtgcatttgcggcgggtatcgccactacagcacagggatatttcaccctgcccaaagtgcaggccgggaaatatgtattgaaagtttcctatatcggcttccaacctacagtgcttcctttgcaactgtcggctcaaaatctcaataagaatgtaggtacgctggctctgaagacagatgccgtgatgctggcagaagcggtgattaccgcagaagctccgcaggtacaggtagtggaagatacgttaatgtacaattccagtgcttaccgcacaccggaaggggccatgctggaagagctggtgaagaaactccccggtgccgaaattgatgatgacggtaacgtgaaaatcaatggtaaggagttgaaaaagatcatggtagatggaaaggaattctttggtggagacgtgaaaacgggcttgaagaacttgccggtggagatgatcgataagctgaagacgtatgacaagcagtcggacctggcacgtatcacgggtattgatgacggtgaggaagaaaccgtgcttgacttgacggtgaagaaaggtatgaaccgtggatggtttggtaatgcggatgcagccgtgggtactgaagaccgctacgcagcccgtttaaatgtaaatcattttgtggataagacacaggtaaccgttattggttctaccaataacgtgaacaaccagggcttttcaggtggtggaggtggtccccgctggcgtcgtaacaatggtttgaacgcgcctaaagaattgggtatcagttttgccacagagaataagaagatagaactgggaggaagtgcccaatataattataatgacgctgatatctctaatatcaactcgtccgagcgcttcttgcagaatggtaattcatattccaactccaactcagtcaaccggaacaagaattctacattcagagccgatttccgtatggagtggaagccggattcaatgacgaatatcattttccgcccgaacttctcttatggtaagacggataatgcttcgagctcattgtcgggaacctttaatgctgacccgttcagtttggttgctaacccgaatgattatctcgattttgatgcaataagtagcgtagacccgttgaaagacatacgtgtaaatgctacaaacagcggtacgctttccgacagcaagagcatttcgacagatgcgactttgcagattaaccgtaagctgaatgataaaggacgtaacattacattccgcggacgcttcggttacggtgataatgacaataatcagtatacggaatctacgacacgttattatcagattcctacgaacccggactctactttggttcgtaatcagtatatcactactccgaccaataactataattatagtgcacaaattacgtatagcgaaccgattgcacgggccactttcctgcaattcagctatcagttccagtataaatacagcgagagtgacaagacgacttatgatttgtatcagatcaatccggagtggggaattggcgagccgttgcctaccggttacgagaaccatgcagtggatagcttaggtaaatatgccgaatatagatactataatcatgatgcatccgtatcgctgcgtttcattcgtgaaaagtatcagttgagtgcaggtatgtctttccaaccacagagttccaagctttcttataagaaaggaaattatatgattgatacgacgcgttccgtgttcaattttgctccgaatgtcgatttccgttatcgcttctccaaggtaagccagttgcgctttaactatcgcggacgtaccggtcagccgagtatggaaaacctgttgccgattgtggacaactccaatccgttgaatatccgtgtcggtaacccgggcttgaagccttctttcacgcactctatgcgtttgttctacaatacgtataatggagaacttcaacggggtatcatgacgcatgccagcttctcggctacgcagaacagcatcagtaacagtaccgaatacaatgaacagaccggtggacgaaccacgacgccgaagaatatcaatggcaactggagcgctttcggtatgtttggattcaatacggcactgaaaaataagaagtataccatcaattcattctctaatatcaattatcagaataatgtggcgtatctgtacaatcaggaaactaaagttgatgataagaatacgacaacgggcttgacgctgagtgaacgtttgaacggtgcctaccgcaatgattggttcgaattcgggttgaatggctctatctcttacactgccgagcgtaacaaactgcgtccggacaataaccaggaaccttatactttctcttatggtgccaatacccagttgatggctccttggaacatgactttcactaccaatatcgccaatcagagccgtcgtggttatacggattcaagtatgaaccgtaatgagctgatctggaatgcacaactctcgcagactttcctgaaaggtgcggcaacgataagttttgaaatgtacgatatcctgaaacaacaaagtaacattagccgttcattgacggcagatggtcgttcggtttcggagtacaatggtgttaacagctactgtatggtgcactttatctatcgcctgaatatctttggtaacaaggctgcccgtgagaagatgggtagaggtggatttggtggccctggtggtcctggcggtcatggcggacctggtggacgtcccggtggatttggcggacgccgtttttaaagtaaactgaccagttattattataagtttccccttccattcgctttcgctgaaaagagatggaaggggattctgttatttagcgtttccctgcgttgaagcaaaagcctacatgaaattctattcctatgttgtggggggaaacaagtgtctggtcttcttggaaggaatatttgaagagatctttgggaaactccttatcaatgggaagaaggccgtattcggcaccgataccggcaaaaagacatttgtacttgaagtctactccaagacttaaaccgatgtcaaggcatttcaaaccttcgtttttatcgaatgtcttatgcgttgcttcaccatttaccaatgtagcgccattaccttcactgggcgtgataaagtcatcaacatcaagtctttccttagtggcaagcacccagttcaatttactttttccaccaattcccaaagcgatatacggaccgccactgaattgcaacccacagttattattcaaaggcagatatgcggctactttgatgggaacttgtaaatagattccattgatttttgaatcgattcctaatcccatatagatttgcttgcctgtttccgtaatacccaaagcggttactgcttcatcaatagagtagcttctgtttagtagctgtagtccggtctgcatggaccaagttttgtcaatagggaattctacgccgactccgaaacggtacccaaagttagcattgtaattttcattcttggtgatgccggtcaatccggttccaccttgtacactgatttttacttgcgaatgacagatagtagttgacaagcccagcacgagggcgattaaaagatgttttttcatatttcatagtattagtgtgtaattacgcaaatatatgtaaatactttaaagacaatctcttttttcttataaaaaaacaggaattcttttattttctctatatttgcttttgtgattgactggaactatatactaaaccaagtagctaccgtcgcctttgatattatttactttggcgctatcatcggaacaattgttgtcatcattctcgacaatcgtaatccggtgaagacattggcatggatattggtattgatgtttctgcctgttgtgggactggtcttttacttctttttcgggcgtagccggaggcgcgagcgaataatagagcagaagatttataaccgtctgttgaataaaccgatggtggaatacctggcgcaggatgccactaccttgcctatagcttatagccggctcatttctttatttcgcaatacaacccaggcgtttccttttgacggtaaccgtgtagagacttataccagcggtgcttccatgttgcaatccctgttgcgggaactggctaaagcccggcaacatatccatattgaattttatatttttgaggatgatgccatcgggcgaatggtgcgggatgtactgatagagaaagtacgggcgggcgttgaagtacgtgtcatctatgacgatgtaggatgctggcatgtgcccaaccgtttctatgatgaaatgcgttcggcaggtatcgaggtacgcagctttctgaaagtacgtttccccctgttcaccagcaaagtgaactatcgcaaccaccgtaagattgttgtgattgacggacgaatcggttttgtgggtgggatgaatctggcagaacgctatatgcgtgggttctcatgggggatttggcgcgatacgcatcttttattggaaggcaaagccgtgcatggcttgcagaccgctttcttgctcgactggtattttgtagaccgtactttgatcagtgcctcccgttattttccgaagatggaggcatcgggtaattcgttagtacagattgtgacgagtgatcctatcggtccctggaaagaaattatgcaaggattgagtatggcaatttccggtgcgaagaaatatttctatatacagaccccttacttcttgcctacagaacagatactggctgctatgcaaacggccgcattggcaggagttgatgttcgactgatgctgcccttgcgtgcggataatcgccttacgcatttaggttcttgttcctatctggcggatgtattgcaggctggtgtgaaagtttatttttataagataggttttctgcactccaaactgatggtgtcggatgatgaacttactactgttggctctaccaatgtggacttccgcagcttcgagcataattttgaggtgaacgcttttatttatgatactgaaactgcactgcaaatgcgtgaaatctttcttcaggatcaacgcgagtgtgtgcaggtctttcttaaaaactgggtgaagcgtccctggtggcggaaagctgccgagagtgtggtgcgactgatggcaccgctcttataaactctcaactttcaacttctcaaagaaggagaagttcacactgccatatacccgtctctctacaaagttcggatgatcttcgaagttatctttctttccatgttccaatacaagcaagccttcctctttcaagagattgttttcgaagataagactaggaatggtttccaatccctgcaattcgtacggaggatcggcaaagatgaaatcgaactgttcacgtcctcctttaatgaatttgaatacatcgccacggatagggatacatttgtcagtctttacctcttgcattatcttgcagatgaaagcatggtggtcccggtctttttcaacgctgattacgcggtcgcaaccccgtgataccagttcgatgctgatgctgccggttcctgcaaagagatcgagtgcggatactccgtcctcaaaatccagataattggcaagtacattgaacagattctctttggcaaaatccgttgtgggacgtgccttgaaagtacggggcacgtcaaatcttcttcttttatatattccgctgattactcgcatgtggttattgcttgtaggtcgaggttagtggcagggttcatgatgaatacctgccggataaattttcgtagttcgctgagcaaagcttctttgtcggacaattcaccggtgaggtgcatttcgtcacgttcctgttcaaagccgagttgcttccatatatataataggtaatagatgcggtccgctgtctgtttacattcaaaggagttggcaagcaacaggtgattgcggtcgtagcaatacaggtcggcggcatctttccgcagatgcacgtacattttccgactgttgcccaggcggcttttgctggagaaatattcgatgaacgagcttgcctgcgaataaaatcttacatcgggatattgttcgcacaggaaagaacgggcactcttgtccatactgaacaatactacggcattattttttcgcagaatgttgtattgcacaatttcgttttcccgcttcgggtggttatgataaaaaagtgtttccgtctgttcgtcttcaaagaactccagtggcacgagggtaaagcgtttgtccgccatgagtatatttacccggcgataagggtgtttaagccattctatttcacggaaagtctgtttaagattggctgtgagggagagtgattcttctactttccggtcaaagaaagagagctcgccttcacccagagggttgaatacagaaaaagaaaatccatccgcactgaggcggatggataacgtatattgttccgatttactaaagtcaatcgtttctatcatacagtgttgcggatagggaattattcccagttacctgcattattgttagcagtttccaagctaccgatcatcagaccgcagtatttacccaacttagtctgtacgtctttcatgttagcaatttcttgcttgtccagaccacccaggtaagtttcatacggagtcttaacttcgagcagacagaaaggagcaccggatttagctgtatcgttcttgatagccatttcgaattgtgcgccgccaccgtaaggaacatatctcatagaatcgggattgaaaccttttgggaaaatagtatccagtactgcaacccacattgtgtcacgcttgaagttttccaagcctgctttctttacctcgtcgtatttacctgttttcttagctttgttgatgatagcaatagctttcttttctgtcataccgtcttccaactgcttgtcattcaattcaccttctttgtagatgaaaggcaacttctggtttttaacaaagtagatcaaagtgtcgaaacttgccgtgtactgttggtggttcaagttacgatactcctgctgtgctttacggatgtccattaagcgggcaataactgccttctctctgtgctttctagccttttcgaaattaataggacccataatgctagcatagcagatgtagatcagtaccactgcacacaagcctaaaacgatattaaatactgttttcatgataaatatgttttttagttgttatattcgtaccgcaaaaataaaataaataattctaatggcgatagttcctgtaacttttttctattacaaaaatgataaataactatttagaaacgcaaattaaggaaaattttccttatgaaccaacttttgagcaagaaatagtactaaaatcattagctgccttcttgttatctccccgtaatgatgcggtttttgtgctgcgcggatatgctggtacaggaaaaacttcgctggtcggagcgctggtacggacattggataagttgcaacagaagtcaattctgttggctcctacggggcgggcggcgaaagtcttttcggcttatgcggggcatccggcgtttactattcacaaaaagatttaccgtcagcagtctttctccaatgaggtgagtaacttctctgtaaacgataatttgactactcataccttatatatagtggatgaggcttcgatgatttcgaacgaggggttatccggtgctgtgtttggtacagggcgtttgctggacgatttgatacagtttgtttattccggtacaggatgtcggttgatactgatgggggatacggcgcagcttcctccggtgggtgaagaacagagtcctgctttgtttgccgaggcactgaaaggttatgggttggaggtgatagaggtagatttgacgcaggtagtacgtcaggtgcaggactccggtatattatggaatgctacccggttgcgccaacttatagctgaagatgcctgccagagtctgccaaagataaaggtatcggggttcgctgatataaaggtagttccgggcgatgaactgatagatacgttgagtacttgttacgaccgtgacgggatggatgaaaccatcgtcgtatgtcgttccaataagcgggcgaatatctataataatggtatacgcgcgcaaatcctttggcgggaagatgaattgaacacgggcgacttgctgatggtagcaaagaataattactactggacagaaaaaagtaaagaaatggatttcattgccaatggtgagatagctgttcttcaccggatgcgtcgtacacgtgagttgtatggtttccgttttgcggaagttctgctcacttttcctgattacggggattttgaactggaagttaatctattgttagatactttgcatagtgatgcaccggctttgcctaaagcggacaatgacaggctgttttatgctgtgctcgaagattatgccgacattcctgtaaagcgcgaacggatgaaaaagatgaaggctgatccgcattataatgctttgcaagtgaagtatgcttatgccgttacttgccataaagcgcagggcggacaatggaagaatgtatttcttgaccaggggtatatgacggatgaatatttgacaccggattatttccgctggttatatacggcttttacccgtgctacaggtactttgtatctggtgaattacccgaaagaacaaatcgtataaatagctgggattaaaaaaaatatctgttcgcatgcagtaattaactatttactgcattttcattatacgaatccgatataaaaagactaaaacaatgaaacacatctattctattctaatgttgatttcactcttgtttgtgggtactgcatgcgaggatgattatcgtgatatggtattttttacgggagaggcgcctatttaccagattgggacttgtgataatctgattggttccgtgaatctctatcaggataaaccggaaggtattattgtcggtgtggatggaggtgatggcaactatgtcataataaacggaaacgatgccgtggtaaccgctgcttttgtgaaaaatgaaaatggctatcagcgtatattggttactcctaaaggaataggtgagacttcgataacggtaagagacggcagtggttcttcggcaatgttgagagtgaaggtagacgaatgtgtgaaatttgtttggtctaaagagaaagatggcattgtggttattggagaagctacagaagaacaaaagaagaatatagtggatgcatttactaacttctttaccgtaaaggagggaggacgttatgagatgataccggataatgaatctgatttgtgggaaaaaggaatcctgcgtgtccgtccggatgattctactattgctcctttcgtaggacaatatgaaagggtaccggttatggaaggtgaagtggaacgttcaggtctgctatttaagtataataatgaagagcatctttatactttcaatgctcctaatcttaccaggctgtctgtaatggaatatatcgacttttgggaagatgtaaccgaagtctgtccggtggaagtcccgacaggatgtaaagtttatcatgtggaacgcttaaaaccacgtaatcagagtggagaataattaaaaaagatatactaatctaaccttttttgtcaagagagaatttatgtatgtttaacggaacgggagggcttcggctttcccgtttctattttctgcaaacagatgatgtgttaacctgaaacggatgatgtattttactcaaacagatggtttgtttggggtgattacatcgtttgttttagtccattacatagtatgttgtcatataaaacatactatcttaactcatttcacttctatagatacaaaaaagaggagaaacattcgcttctcctctttactatatatcttcccgaaactaaatcaggattacattgacaaagatacgacatcagaatgtcaaagtcaagtcttttgccagttatttacttgcacaggcgaataataatccgcctgccttcacaagtcaattattaaattccggcaagttccagtaccttttctattgctgcattcagtccgtcaatgttctttccacctgctgttgcaaagtgaggctggccgccgccgccgccttgaatcagtttggcggcttctttcaccagatttccggctttcaatccaccggctacaaggttatcacttaacattactgtcagcatcggttttccttcattgatcgttccggcaacgaagcacaggttttctgtaatctcgccacgtagttggaatgcaatattcttaatactttctgcaggtatcggagcacaaatcttaattacctttatgccgtggatttcctgcatgtttttcagcaatctttcctttatctgcgcctctttctccctcatgaagtcttccatctgcttcttcaatccggcattctcttcaatgtacttgcggatggttccggccaagtcgggtgcattgttgaagagcgctttcagatctttcagagtatcttcgatggtgtccatcaattcctctacgcgtgcaccggtgtaagcttcgatacggcgtacgccggcagcaacggagctttcagatacaatctttatcataccgatgtttccggtagcggcaacgtgtgtacctccacagaactcaacggatgaaccgaactgaataacacgcacatggtcgccgtacttttcaccgaacaaggcgatagcacccagttctttggcatcttcaataggaatattgcggtattccttcaaaggtatgttagcacggattttagcattcaccagatgttctacctggcggatttcttcgtccgtcactttctggaagtgagagaagtcgaaacgtagtgagtcgggggttactaaagaacccttttgctctacatgctcgcccagtacttcgcggagtgcagagtccagcaagtgggtagccgagtgattggctgcacaggcagcgcgtttgtcggtatctacacaagccatcatcggaacttccggatgtgcgggcaatttcttggtaatatgtatcggaaggttattttccttctttgtatcaattacttcaatcgtttcgaattcgctgaccaatacacctgtatcacctacctgaccaccgctttcggcatagaacggggtatagtccagtacgatttggtacaatgtctggtttttctgttttacttggcggtaacgaaggatacttgtttcatattccgtatagtcgtaacctacaaattcagtggttccttctttcagtgtgatccagtcgccggtttctatggcagcggcattgcgggcacgttgcttctgctgttgcatctcggcgtcgaattccttgatgtcggcagtcataccgttttcacggagaatcagttccgtcaggtcgagcgggaaaccgaaagtatcgtataaggtaaaggcatccttaccactgatttctgtctttccggcagctttggcgtcagccatcgtcttatccagcaagcggataccggtttccagtgtgcggaggaaagagtcttcttcttctttaataaccttgctgatcagttctttctgtgcttccagttcaggataagcctcacccatattctcaatcagaaccgggagtaatttatacatgaatgcctgtctctgccccaggaatgtataaccgtaacgaactgcgcggcgcagaatacggcggattacataacctgcctttgcattcgaaggcaattgtccgtctgtaatagagaaagcgattgtacggatatggtcggcgataacacgcatagcgatgtccgatttctcgtcttcaccatacttcttgccggtcatgttgcctatagccttcagtatgggttggaatacatctgtatcataattagaagtcttatcttgtagtgtacgcaccagtctttcgaagcccataccggtatcgataactttggcaggaagtccttcaaggctaccgtcggccttgcggttgaactgcatgaacacaagattccagatctcgattacttgtgggtggtctttgttcaccagttgactaccggggatctgagccttttcttcttccgaacgcgagtctatatgtatctcggaacacggaccacacggacctgtatcgcccatttcccagaagttatcgtgtttgtttccgttgaggatatgatcctttggcaagaattgttcccaataggaagcggcttcattgtcacgttccagtccttcttcggggctgccttcgaatacggtggcgtaaaggttcttcgggtctatcttcagaacatctaccaggtattcccatgcccagttgattgcctctttcttaaagtagtcaccgaacgaccagttacccagcatctcgaacatggtatggtggtacgtatcgtgtcctacttcttccaggtcattatgctttccgctaacgcgcaggcatttctgcgagtccgcgactcttttatattttgccgggtggttacccaaaataatatctttgaactggttcatccccgcgttagtaaacatcagtgtcgggtcatctttaattaccattggagcagagggcactatctgatggcctttgctctcgaagaaactcttgaatgagtttcggatttcatttgcagtcaacatacgtctgtctgatttatgattttatgatttatgatttatgccatgaggatttatgacttatgcatcacatgatttaaaagaataacttgtcgaatactgtagatgtttccccaccactgttttcttataaatcataaatcataaatcataaatcttataattcttgaaaaaactgtgcaaagatagcttgtttttattacttttgccgtattaatgagcgaaatatttccaaaagatgcgcaaagtttactacatttataatccacagacgcagacttatgaccgtatttaccctactgtccggcaacggatggtgagtctcctgcgccgtttgtttatcggcatgggcttaggggcaggtagtttcattattctgctgattatcttcggttcaccttccgagaaagagttgaggaaggaaaatagccaacttttagcgcaatataatgtgctttcccgtcgtctggacgaggcaatgggagtgttgcaggatgtgcaacagcgtgatgataacctgtatcgggttatatttgcggctgaccctgtaccttcggctattcgtcaggcagggtatggcggcactaaccgttatgaacacctgatggatatggcgaactccgatctggtagtgaatacaactcagaagatggatatgctcagcaagcaactctatatccagtcgcgttccttcgatgatgtggtggatatgtgtaagagccatgacgaaatgttgcgttgtatccccgctatccagcctgtttccaataaagaccttcgcaaaacagcttccggttacggaacgcgtatcgaccctatttacggaactacaaaattccatgcaggtatggacttctcggcacctttgggtacggatgtttatgccacaggagatggtacggtgatacagatggggtggcaaaccggatatggtaatcggattgtggtagatcatggatttggttatcagaccgtatatgcgcatttgcgtgatttccgtactaaggtcggcaagaaggtggtacgcggtgaagttattggcggggtaggcagtacgggaaagagtacaggccctcacttgcattatgaagttcatgtaaaaggtcaggtagtcaaccctgtcaactattactttatggacttgagtgccgaggattacgaccggatgatacagattgctgccaaccatggtaaagttctcgattaacagctatggataaagacttgaaattatattattccatcagtgaggtagcccagatgttcgatgtgaacgagtccttgcttcgtttctgggagaaagaatttccacaactttctccgaagaaggggagccgtggggtgcggcaatatcgcaaagaggatattgaaactgtgaagctgatctatcatctggtgaaggaacggggaatgacattacccggtgcccgccagcgaatgaaggacaataaagaaaacactcttcgtaactttgaaattgtagatcgtctgaaagctattcgtgaagaactgctcagtatgaagagagctcttgacggatttacttatgaacaggtggaggagctgaaaaaagatattcaggaaatagaaggatgaataggattattttataccgtgtaaggaaaatggataaagtctcaaatccccgattacaaaaagttaagagtttgtcgacaagaagttaattccttgttgacaaactcttaatttcttgtctactaaaaattgatatcttgtaacccgttgataactaacgataaaaactcttcgcatagaagcgtggtttgtgtataaatatcgcttattttcatttaacggatcatctcttttatacaatcttgctttatagattccttataaccttatggatggagcctgcccaataattacgcagcccgaaacctcttgctttaccaccggttgcccagtcttgtattatttctttcgtttccgtattgaagaatactacttgataggaaccgtatgcttctgctttgttcagtaatttggcaatgataaccaagccaatacccggtttcttttgtgtgggaagtgcgttcacaatttgcttaatctgatcttcactcagcatatagcttgcattggtcgtcatcaattcttgtggatcgatagcttcattgacctgattgacagcatcgagtgagatttcattaactcttactttcagcttcttacttacgtcatatttcttggcttcggtaatgaacaatcggttaattccatcaaatgctactttaaattgtgccggggtttctgctgcgccaaatactttagccgctgaatagtccactccatagaaattgatactttcaacttctttaaggaagttcttgttttgtccgaaacaaatcatgcttgttgcaaggaacagaagggtgaatagctttttcatacaattaataatttagaatcagtactcagtttattattttgtcaaaattagaaattagttatcgtaaatcaaagaatttgatgctttttctactcatcggaggcatttgtatctgagagatatattctgccggttcaaaccggatggtaggagctacccgtattttagagcggaataaatctttaatttctttggcaaagctttcgctgttttcgtcactgccaatccgaatcaatatctcgtctgtacctaacttgttggtatacacctcaacaacgtagttctttacccggggaatatcatccaatatgtcgaataatgcaggtggatacagggttgttcctttgtattttatcatttgtccttttcgtcccagcacagaacttaaccggatggtgtttctgccacatgcacaaggttccgtatattggtaacagatgtctccggttttgaaacgaagtaaaggcataccttctacccctaaagtggtaatggttacttctcccggttctcctgccttcaccggaaggttcttatcatccagaaattctacaatgataagttcgggttgcaggtgtccgccatggaattcagaacattcggtgaaggacgattgcatttccgtagaggcataagtggaatagagttggagtgacggccacttttcgctgatacgctgtccaagggtgtttaatgtaaaatcggggttacgcagtgcttcgccgatacatacacacttcttcatagaacaggtgttataatcaatctgatttttctcggcaaactctatcaatttaatcaggaatgaaggaacgaccatgccgcaggtagggtgaatacggtgaatggtatcccattgcagttccggtataccgttgcctacacgggctactcccataccgagctctctggctcccaagtagtaggcaagccctgccatgaagcggcggtctatggtggtcatcagttgcagtatatcgtgtcggctgcatccggcggtattgaaggacagatactcgttgtatgccagacggtccaggtctttggaggtcagtacaaaagtaaccggatctcctaaagttccggaagtggtgacatagtcgataatatcatccgggtctacacagatgaattcactattatgtagttgcaggtctgttttggtggtaacgggaatttgttggaggtcttctatcttcttgattcgggtgatgtctatggaatgttctttgaacatttgctgatagaagtgggaatgtgcctgcaagtaagccaaggtttcagtgagcctggcttcctgatacaatttaatctcttcgggagagcgaaactgtatgtctggattcttttccatattattgttttttattgattttttgttggattcgtactttctcagcttgtttgggtatgggcattgttagtgctttctgccaataggttatggctgtatcagtttgttgtattgcagcataataatctcccaatatctcgtaaacgtaatagaatgaaggattagatgcttcataaagattcaggacctttgtttctattgtttctttccgttggatcttttcccggatgagcttcgttagctgtttataagccatgaactgtttgtagtttgcttgcctgataaagttgtcttcgggaatagtcagactcaaagtggcgatttcgtgatggaaatctatggtatcgctgaatattttgtttagatcgtatgccatatacttgccgcattgccagggagaagtggatacatacatgatctgtttctccggtaggaaaataacagagtgatgggctatgagttgattgatagccatttcattacccatgcccaaatcaatattgtccaatcctttttggttgcggagaatggaagcagctttcatcgggtcgataggcttattctctttcaacagttcttgcagacgggcaaaacgatagggactatcggaagtcgcaatgttttcctggttgcgttcatcgttgcggaaagtatctgattgataatggttggtacaaataatctgattaccgctacttgtaaaaagtgccgtcttctccggtgacttttcaatgatagcggctctgccatcccgcgcagaaccgatcagtatggattcggaaacaaatgtttttcgcttcagggcgatagcataagcttcatcaatcgttgaggcatattgcagtatctctctggttaggatagagatgggagtggcggatgcagtcggcatatccgattttgcagcattgatagtcaccgtgagtccggtttcattcatgcccgaaagtacaccgatcatacccggccaacccacggatgcaaatttatagccttgctcgggctgataaaaagataccagcttgttgtgtgcaaacttatcccccatgtaaaaatcaaaattgcgtccgatgatgagggaagagtcggcactgttttctccccaggtggcaaaggaactgcaacctaccaacatgtaatcttgcatggcatgtcccagatcgtgagccgaatgataattgagttggcgctcgtagggagtaccgataaagtcgtactcatgggtacaggagagcgaaataccataaatttcatctctgaattcttccgggacattctctcctaaattacggttgaaaagtacgatgaagaagcggagaaacttaagataattgtcagaaggtactatttcgcgtatctggtcaacaaagactttctcctgatagtatagcaaatcagaagaaagtttgcctatggcctcaccgcgctggaatgcatcgccactcaccttcaactcccacagaccactgttgctttgccgtagataattgcccgcatattcccgaagactgtctgtctgtaccaattctccgttggccttgggggtgtagtcgggagtcagcatatccgcagagaaatagaggatgctaacaaagaggataatggcaaggagaagcacccctatgccacatgccgtatatttaattgttttctttaatatcttatgcatggcctattcgtttagctaaatattcatgtccgagtaattcgccacaagtgatgatggaggttaatgtaactcctaaagcaccgtggacattcaggttctgtcctgtgagaaataagtttcccaatttggtccgggtggaaacaaaaccgatctgcggacatttgtaatctttgataattccataggcggaaccgtcgcaagtacccgtaaagtctctgtagctaaggggagtagtggtatacattgtctcgatgtgatcggtaaaatcgatcccgtggcttttgatgaactccaacaattgcttggctttttccattttgaaggctttatagtcttcacctcgttgttcgggaagtgtatcctgccaggcagacagttcatctatatacatgggagtcagaatggatatgacgtctgcataatcactgttgcgggaagatgcttgtgtggagatcatgcaattggtggtatatcccatattgactttcttatcataccatacatcattgtctccatgcagatagaggttctgattcagatacggataacttttctctttcataatcagataaagagtgaaaatgccgtatgtgttttctaaagaattaatacgggagatataggcatttttgatacagcgggttttgtccagcaaggttaatgtttgtttggggtgtacgttagagatgatgtatttgctttctatccgctctgcatggtttatctctacccctgctacctgattgttctctacaatgatacgggtgacttcactgttgttcaaaactgttccgccatgagtgcgaatcacattgatcatctcagaggccacttgcatacttccgtcaatgaaccgataggctccttgtatgtaggagttgttaatcatggcgtgttcatagaagttggaatgttctcttaaaccaccatacagaagtgccgagccggccaataccgattgcaaatcaggattggtggtaatcttatctatcattcctgctgctgaggtattgaagaacttcattccttcagtagaaataatgcctttcttcagattgtccacactgatcagattacctacttctttcagtaacgttgtatattgccggagattttctttttcgtgaggaaatgattggcaaagggtatcgataaaacgttcgtatcccattgcgtaatcatatacgcgattcttatagaaaatcttatcaaaagcattttcatccagtttccggactttgaggtgatccataattcctacataccggaaaaactgattcatgacttgtccttcgtccagactacctatataatgaattcctgtatccaacaaatgccctttccggcgataggtctgaaagcatcctccaaacagttcgttcttttcgaacacacatacgttatacccttctttactaagtatggctccacattcaaggccacctaacccgcttccaatgatgatgatgtcatacttactcatggcaattgctttttaagtatatagatggtattcgatgtatatttatcgttgcggatagtctttacttccattccacactcccgggctatactctgaatttgagcttcggaagtgaagcagagctcatccgtagtgcggttgaacttgacaacttgggtagagagaacttcagtgaggcgggttagccgatgtttatgggtctcagcggaatttccatcacgtacgataatcattccttcaggacgaagaagattggcgcatttcactaacaagtcatgttgatgttcataattcatgtaatgcaatacgtcattcaggatgaagacatcactttccgggaacttataaaccgatgcgtcagcatgttcaaagcgaagattttcgccacgaagccagccgtgttgagctatagctattttatcttcgtcataatcgattcctaatatttgcctttctttggatatcatagacagcatataacacagaggacccagaccacaaccgatatccgtaatctgtcctttcatcggaatcagttgattgaataactggtaattgtgttccatctttactttgatgcggatgtaccactcgatgacaggacttttatagatatagttcagtaccaacgcctcataaaatgccggattcgccggtgtattcttttccaggcaaatacgtgcatattcttctttcatataggaagaaatacgcttggtacgttcctgataggtagttccgaatgaatcatcgttataaagtatgcgaggcaatattttagagtaaataatgcctttgcggacatagaaaggttgtgccttggctataatctctccattgccgtatagcagaataggaataatatccaattgcagagtttctgataaatagaaagcacctttatgaaaacgtttcatcttgccgtcataggtccgggtaccttcggggaaaatggcgatggagtatccttctcttactttttcccgcatccgttccacacaaagttcatatccttcgtctacatggaagaaacctgcatattgaatgatttttccaaataccggagagctccatacccagtgattggttatcatgataatcttcggggaaaaagataataactccaggatatcaatgaaagactggtgattggctattatgatagccggctttttgaatgtctcattggttacgttgacgtgttctttacgtacaaatgttgccactaccaatatacctttgcaagtaatgttgataatccggcaaacaagctgctgcttataactgcggcgtaccggaatgaggtataataagataatgaaaattctcagaatgatgcatcctgtaacgaagagcatgaaaaggatgatcgtgcggagtaagcctatcaaggtatacgggggcagtcccttagaagccggtttagcaataaagaactggaaaataataggttgtatggtataggctactaataccaccgctgccattccaaggatggaaatcagtgaaatggattgcagggcgggatgtttggcaaatactaaagttcccattcccacaacggctgtgaatgcagagaagaaaatagctgtcttatgggaattcaggatcgcttttcctgtccggtatttgttttggagtccatccatgatgaagatactgaagtcgtctccgataccgaaaatgaaagtagagaggataatattgataatgttgaattcgatacccagaatccccatcaggcccaaaataatggtccagctgataagcataggcaggaaactgatcagggttaattctatacgcccgtacgaaatcaatagggccaggaatataaggaatgaagaaatataaagtatcaggtaaaagtcgttattgatggcagagacccattgattagtgaaataactccggtcgaagactacaacatccgtattatccttgaattgttgatagacttcttccttattatcatcagtgatgcgtacctgggtaacgagcatcgtgatggagtcagcacttgtttgccattcgttcagtagggtagtggcgatactatttgtatcgtcctgataattatagggctggaatgggtgttctaaccattggtaaaatgtatcgagactaccttcccggaagtgataggtacgggcggcgtcttctatgtatttgcgaatagttgatatctttcccgactctccccaatactggttccattgttccagacgcttttgctgttcttccggtgaaattaagaattgctcggcagatgcatacgctttaataagtccctgttctttaaaagcggataagtgctgattggtatttgcatagctttcgagtgcttctgtcatgtctttacctacactgacaaaaagtacggttttctcttgggcattgaaaagctgttccagtttagcctctgcttgttttaagtgttgaggttcatagttgaggctcatcatgtcttcgttaaacttgactttctgtgaagtaaataagccgatgagggtaataataacgatgatgcctactagccatttgttcttttcataaggataggcattgattttttcaataaagcgtaagaccctgccttgcttcacatcagcttgtcctttcagaaaatgtggaaggtaaataagacagaaaagagtagtaccgataagtgccagagaagcaaacaaaccgaaatcgcgtagcaattcggacgtggtaaaagtaagtccgaagaatgcacctattgtagtgaagctgcctactgtaagcggataagttatttctttaatcaattgctggacagtagaaacatgattttgatgggccagcatgtgtatggaatagctcagtgcaatacccagaatagccgatccggcacctacggcaattgcagagatatatccctgaataaaatagatcaggcataaagcgaacaatcccccgaataaaacgggagtgacaatgagagggattgatttcttgtgcttaaacaccagcgagatgaaaacaatgataatcagcagtgcaatcgaagaagtaataatggtatcctttttaatctgtcgcgcattatagacgctgaccgagggacctccaaagtaagatgcgtgaatgaaaggatactctttctgaatctgttgtagctcgttttcaagtatccggatcagattttcattctcaccggtacttcctgttccgaataccggagtcataaacatcagcaatgtgtttccatctttcgaaaagatgtgtccgttgtttatttcataattggtttccaattgaaaatcctgcaaatgctttaagacgttatttccaagtcctaacgggtctctttgtatataacctctcaatgctatacctgcgggagaaagaaggttggtatagttctttcgcataatggcttctatgccttcctgcgttaaaagtgagtcgaagtgctgatagtctttttccgtcaggaacagcggaagattttcataaacaaaatctgttgctttttcaatggttgtttcatctacttccgaaaagatatctttaatccaggtttggttagactcttctaataagttttgtttcagttggtctccggcctctatcattagatccggagttactgtagagtcggcaggagagattaagatgataatcttatcctttatttttaggttatcaaataccttggtgatgttctggctgttcttcgtatcaggaaagaaacgggtcacattctcttcaaacctgacttgccaggcgaagtaccccataaaaaggacacaaacacagagtgacaaatagaagagaactttgtgtctttgaaaataattatatagtctgataaagaactgagtcatgttgttttcggccttctgtatatagtgagcaggctgatagttataatacctgccagtatactacaagcggttgcaaagataacacttccaattaaatattgctctaaaaccgatttcacattttcaaatgaaatattggtaagatgaagttcaaccggcctgttcaagactttacatcctgtcaggtaactgccatataataggaaaggaatcatgggaggaatactgatattagctgctacaatggctattactttgttgagtttaagcacatgagccaaaaataaagtggcaagcatctggtatccccaaatcgggactattcccataaatacacctaacataatggcataggtaattttcagattcgattcttcggactgtgtaatgtgggtctggaagaatttccggcaattgctccaggttagtttccggaagaagttacgcggataaatccagaggaaagtgatgaacactaagaaggtgttcaatatactgatacgagtgaaatcccggaaaggacggaagtgtgagacacgttcttcctgggggggatagtagacatgtatgggtatattgcggaccgtggttcctccccatactgcaaagaccagtgcctcaagctcaaattcatatttagcggtatagtagaatctctgcacattgattttatgtaatggatagagccggtaacccgattgggtatcctgaagctttactccggtttcaagtttaaaccagaagttggagaacttattggcaaaagtattcttgcccggcatattgtccgaagtcagattacgggcacctaccagcaacgtatccggttctttttctatttcttccatgaaaataggaatgtctgaagcaaaatgctgtccatcggaatctatagtgatggcatatcggtagccggctgctttggcctgttttaatccgttctttaaggcagttccttttcctttattggtaggatgggtgatgatatgcaggttcggatagttttccagaagggtaggggtgctatcggtagagccgtcattgacaacgatgatatcttctacatagaagagtacatcttcaattacggtagtcagcgtcttttcattattgtaggtaggtataataactacaataccaagttgcctggctttctcatgccatagttcctcgctacgttcttccatatttatttgccgattagttgtgcttttaatttgatacagatatcttttgaggatgctccttcagccagaatctggaatgtattcgtttcgttttttttgatagttaatgagagctttaattccggtgtttcattcggattaataacagaaagaaacttgcatgaggctatctgcttgtattgcaggggagcttgttgtattttctctatgcactcttttattatttgtagcatacaaacgcccggaactacgggttgttgtggaaagtgtccgttataaatagcatgttgtgggttgagcatgacttgcactgcccagtctgttccattgatatgctcagagtacgtaatcttatagaaattgtgaagaagttcagccatattagtttgggttttcttttaatttgtccaactgtatacttagccgcagccagggatgtttgatttttatctgttcgggatgttctaaattgaactccgatagatagaatactgatttaccgaatcctctgcctgtagctcttttttcaaaggtactgcttttctttttgatgcggatattctttccacttaaaaatagattcttaaagtctgtttccagtaatagcagcattttctttttcttcatgggctctatgcagctgttgacgtgaaattcatttttccggagtgaaaaatcaaaaagactgagtccaaagtaagtagatgccaatattcttatttcattatccggcaatttccgtacaattaatagaccgctgaagtgatgcttcatgaagtctaactgcatattgtatttttgcgaatattcttcagcgcaaataataggtgtcacatgagatgtggcatctcctgctattgtttttgaggagccgcaggaagtgaatagatacagaataaagatcagattagcgaatagaaaactttgtttcatctttcaaagcattaaatctcttgttgtagaactcatattccgtataattggtggctgtttcggaaagacgcaatttgtaaaccgacatatctttcttatccaggtatatttcaatttccgaaatgtaggcttgtatggctttattgaccggcttaatcttcactatataataggaatcattttcaaaatattccagtttgtagtcggaagacatttttgagagatcgcctatcatgcaggctgtgagcatatcttgcatttgattcatcatcttattggcagttaggctcataatgctctttttaccgtccgatacgattttaagccgggagtcgtttatcactattaggtagttgacgggttgggcgtattccatacgtattttgccgctcttttgataatagaactttcctttggaggttactttctcatccagaatatccaggtacttcacttgtgtaaagtcactttcaatggactgcatggtttgtgcttcctttgccagacggttttcaaaatcctgggtatggattagcttcttcattgtctgggcatgggtataggaaatacccaatatgattgataatattattagtatggttctcataatgcttttacaacatgctgtccagacggacaactgtatatccctgttctttaattaagttaagtatctcttttaataacaggtcactgtccggcatccgatcgtgtagaaggataatagaaccggggcgtaaccttttctgaatacgcttcaaaactttctctttggaaggttgcagtgtatcgaatgttctgatattccagccaacaggagtgtatcccaatatgcggacagcttttgctatagtaggattcgtgactccaaacggtgggcggaataacttgattttctgcgaagttactcgttctaatgcaaactggcaagcttgcaagtcttttttcatccgcgacaggttgtacaagggaaaatgattggtatgggtaaaagaatgattaccaatcagatgtccttcgttgataatttgtcggatcaactcctcattctcttctactttgtgaccgatgcagaaaaaacaagccggtatttgttgttctttgagtacttgcaatactttgggagtttgtaccgggtccggtccatcatcaaaggtgatagctacaattttatcttcagtctgtttcttgcaaaataccttgagatagatgttagaacggatgttgcaagatgcgtagacgagaaagataattattaatatgatcaggatttccactatcattgttttttccggattaaaatgagtgaatggttaatggagtgataatgattatatatcagagccgtttgtcccggatttagattctcttcaaaagttttagccactttccataaagcaaaggaagatgctgtaggatattcaccacattcattcttaaaggtggtgcatgttgctgtgggaaacaggttgttttctaaatcagtatacagggtatcttctttcaggtttccatttttaccggtaacaaaccaatcgatttgtccggctgttaatcggttactttgcaaaaagcaatgaatcttttcggctacttcctgtgtactgctcgcatgaataaaagtcgatataccggcaagttctgctaatgtggattcggtggcttctcgtcccaataggaagaactgggcaccttcgcctgcttgtatgccccttagcagtcccaggcgttgttgtatggcgtgactgttaggggtaatctcatcaatagctcctacgaggacattttcatcaccttcccagattctcatcataccgtccaatagtgcactttcgaaactcaatccccggtgcacatacgtcatgttgtaagcatgtatctggcggagtaatgctatttgagctccgatggtattgaaggttgactggataaagggtgttgggttcagtagttgttcttcattctcaatgattgtattcaggaacttctctgtatctgccaggcatccgagtccggttgcagtgatgatcgcatgtactttttcggaaggtagggtactgatacattccagtccgcaggcaactcccattttgatgatccggctcatacgcctccgtagtgcgacatttgtgataatgctcttgtaatccggttcgttagcggataaataaggggattctccggaagcagtatccgcgtgaatagaagcaatatgattgatatagacaggttgcatcatttctcttttaatgtggaaaacaggatcgaagaatcatttccaccgaatccaaaagaattcgatagtacattacgaatgggtagtccctcgcggaatgaggtttcgggcatcaacatgttttcttctataggttctttgaagttcagattgggatagatgaaaccatgatatacggagagaacagaataaaccgcttcaattccttccgaagctcctaatgtatgaccgataaacgctttgacagaactgaacggaggaattttatcaccaaaaatccgccggatagcaagtccttctgaaagatcattacttagagttcctgtgccatgtacattgatataatcaatcttttcgggaagaatttcactcttagctatggcttctgtcatagaccagaatggtccgtttccttcgggtgaactgccggtctgatgaaaagcttcattcacattcgaatatccgcttaataagcaataaggctctttccggagtaatttctctgattgaagcacaatatatccggctccttctcctaagttgaggcctgcacgggatgcgtcaaaaggacggcagtgttccttatccaaaatcataagtgaattgaaaccattgagggtaaacttgcacaaggcgtccgtacctcctacaatggcagcgtccagttggtcattcctgatcatgcgggctcctaacatgatagcattagctgctgatgaacaggctgtactgatagtggttacaaagtcatttactttcagataatctgctatcatttcagtacttgcaccgcagtcatgagagatgacttcccgtaatcttccttttctattgtcctttttaaaggcattgtagaaatgttcactcaaatccataccacctacagaggtggaagaaatgagacctacacgcaaagtattcaaatctaaccgggcgtcatcgactgcttcccgggcagctaacatacctaataaggctgtccgggaaaacgttttttgtatatctaaagagagtaaccgttttagttcttcattgctgtattttacctctgatacgggtacatccagttctgtagggaaaagagtgactttcctcataccatgctgatgtttcctgagtgaagctatattttctgcaacacccagaccaatacctgaaacaacacctaaaccggttacatatatcttcattgtttctgattttcagagatatagttagctaatgtacgtattgagtagaaaatctgtttcccttctgcaggattctttattttgattccatagttacgctctaaaataaggataatctcaagtgcgtcaatagaatcgagtcctaaaccaccgtcaccaaacagaggttcatcaggattaatctcttcgggtgtgacttcttcaagattcagttcttctattaattctctttttagtttttctattaattcttccatatcaatgttgtacttctattagtttaaaatcagctttatactcttccattaaaaggttgcaccatccggtgatgcaagcttttaaattacctttcttcattacaattcgtgcatattcttccagtttatccgcatcgaactctttttctatgaagaaagtattttctccttgtatcttatgacggatacatatctcaccagctacaacgttaggcagagtgtatacaaataccgtcggactggctgcatggtcaccttcctgattgataatcatctgatgacgaatatccgtattcagtgaggcggcagcattaaccagcaatatccctatttcttccggttgaaagtttttctccttcaacagatattcaacagcagtatatcccagtttgcaaaggtcgtccattttgtagaatttcatgttacttccacctgtatttttatatgcttcgcggataaactgcgcaaagtttggggcagatgatgaaaaaacggtctctccattcatacttaaacagctattctcaatggaaacagttgcggtcgtatgaactgtcaccgatgattgcactcttgagggctgtttctgatatgcgggaagtgtcaatacgatagcagcattacaacctccgaaaccggatgctgttttgatacagtgtttcatgggtatttcctgatggtcagcttgcaccagaataggcatgctgacaccgggcttttcatagcctaatgtaccgaatagtacgttttcctttagttcgtgaatacagataatagattcaatcactcccgatgcccctaaagtatgaccgaaataagatttcaaactatgaaccggaacggtttccaatccggctaaatgaatagctttcgattccatttcatcgttatagacagtagccgttccatgtgtattcatgaaactaacgtcttcggcaaggactgcggcttcttccatggcctgccgtatggcgaagtaaagtccgtctcctgtacgtgacgggcctgaaatatgattggcatcgttgctaatggctcctccggacaggatgatatccgtatcgtttccttccgaactcagcaggatagcaccacaagcctctcctaaattgagtccgtctctccgggcatcataagggcggcatctttcggtactgatggatctgaaagatagaaatccgctggtaatgaagtgggagaggatatcacctcccgctactatgacttttttgtatctgccggattcgatccatcgctttgccacaatcagagcggatactcctgatatgcaggcattagaaataacttctacccggttgccggcctgaaaatattcgcttattcttcttcccatttcccatagatgaactctgatatcaggggtgtcgggatgattggccaacaggtcgatattacctttagtagtggataggatgaggccacaatcttcatccgccagattcatttcggaatgggacagaatatcctgaatggcaagtatgaatagttgttccagacgtgtgtacgtacccaaattctttgctctttcccattgttccggttgaatcgtggcagctaatatagaggtatcagatatgattcctgcttcatgcctggtgattccgcttcgatattcccggattgcttttatattctcccgggtatttgctcctaaggaactgatcagagtatcagctgtgatatatacagttataggatgttccatttctttttccactcctgataaaaagccggagttgctaactccagctccctgttagtatttagaaaaacctgagttgtacttccggtggcaacgatattattgtctgtggcccggtatagtacatattcgaatttaatcttggcagcttcacaagaaatgtatcgggtttcaatgataactttttcaccgaaggataaggattgcttaaattggcagtttaattcaacgatgggtaccatatatccttcactgtagatatccatatatcctaagccataatgttttccgaaagactcccttccatcttcaaaatagcgtacatattcaccatgccatacgatttgcatggagtctatttcactgaaacgtacctttattgtggtgcggtcaatgagtgcaggtgtatgcagattcgttttttgcctcatttcttatctaaaaatattttcatccggcattctgcaatcactctttccgtagtgcttacacaagcagataccaaagtaatgtcgaatacttcctgaataaccgtaatttcagtggataattcctgtcctgtctccggcaaacggtgaagggttaatttatctaccgaaccgataaagcctaagggtaccggttcatttttctgtaaatagatatatccgatccgtgccgccgctgattgggctatgtgttcaataatacctgcttcctgcaatttgccttcctggcagaagatattatcgtcagtgactgtgagacctgaataggaacaatcatcttcaatgccacagaatgaatctaccataacgattggcagtcgttgtggtatcaggttcaggattccttcaccggatatgataggagttcttttcatttcaacttacattttacaatactgtgtcccaatcccaggttatcatatatttcctctatttccaaccctgattcttgaatgcaccgtgtcatatcgtcggagtgatacattttgctgttaccatttgccatagcagtaaagtatatactgatctgtgtcaggcagtaggcagcagtttcgaacttctgtcggtcccagaatgtttccataatgtagagtcgcccttctgcagacatggactgagcagcccgtgagagtatactaataacttctttctcggaaaaacaatccagaaactgactcatccagatcgcatcaaaacctttcgggaaaggtactttttcatcgagaagatttacaccatgtccatgaatacgctcgtggccgaccattttttccgtcttttgcttcatcatttccagttgttggggtaaatccataatggtaacttctactttctcgttgtattgcacacatttagtagcccatctacctgtattgcctcctacatcgagcagagtccggggagagtggctgaatacgatttcgagtgcctggtcgaaagaattgtccgaataaaaatggtcgaagccgaaccagcttttctgtgcctgcccgggtaagtcggataatccctcgtaaatagtaggccagtttcccagttctttcaaaccttcggggcggccatttagcaaagcttcttccaggtggaacagacctttgtaattgacgtcctgattaaaattcatattcacttgtgccatctcatcgttcaataggaaccatccggcctttgccagtatatattgatcgtcttttaccaatacagtacctatggtgagggaggcttccagtagaacttgtgctgcatatctggataattcggttttctggctgatctgttccagtgacagaccttcccgattatcggatagcaggcggaaaataccgaatttcagcatcaagcgtgagacctgaaatacgacggggccaaaagcgatttcctgggccaatcgctgtgcttgcacagcggtgaatcgctctttggcatatctcttttgtaatgaagggaatagtttcattctgttgatttttgtttattcagacggcttccagaaagaataatagttaaaccattgttcgggatattggccgattattttttccagagcattcacatattgttccaataataattgttctgctcttttctctttcgaaccggacacttgctcagcaagtataaaatggaaatgataggtttgtttagcctcccgcatggcaaaataaaagactaccggaactttcatccgcgatgccaataggaaaggaccgattggaaaatgtgcttcgtgtcccatgaacttgcaagtcagcagtttatctgcattcagatagcggtctccttgaaaacaaacatattccttatgatccagtgcctctgtaattttaaatatatgtgccagattatcttcgttgaccggtataatcttgtagggttgctgctgcccgttctttttcagtatttctttaatcttttgatgttcggcatcgtacatcaccacattcattttcttgctgtagtcattgaaaaaaggagttccgatttcccaattgccaacatgtgcaccgatcatgattactccctgatctccatccaatacatttagaaactcctgatagtggttgaacttgaaatgatacttgtcgatcattccatttccaatggctaccttgtctataagtatctgtcccaaacgataatagttgttcagcaatagtcccaccgactgtatgcggttccgttttaaaatacgacgggcatattgccagatactctttgttgctttcggagcgaacggaataaaataaagaacaatcagagacagaaaaccataagcggcttttacaccacaatacctgatcaggtaaataaaaaacaggtatccggatacaccgccacgggttttacctttccacatcttgtttattcgtttttgttttcggccatacgtgtgatgacgagattatagaagtcctggaacgttttgattccgacaaaatcttgtccggttacattaaaaccgaagttcttttcaatcaacactaccatatctaccaagtccagactgtctaactcaagggtttgcatgagcggagcatcaggctggataagatcgatatctacttcaaattcctcggataaggtttctcttatcttttcaatgatttcttcgtgggtcatacttatattactttacttttttaataattaatgtagaattggttcctccgaatccgaatgagtttgagaggaatgtatcaaattccatatttactcgttgggcagggatattaagttgggcagatgcttcatccggctcttcgaaattcagattgggagcaatgaagttattttgcatcattagagtagaatagattacttcactggcacctgccatccacatttcgtgaccggtcatagacttggtggacgtcacgtatgggcgatgtctttcaaatacctctgctatggcttttgcttcattcaaatcacctattggtgtagaagtggcgtgcgcattgatgtatttaatttcatccaatgcgattccggcattccggatggccatttccaatgaacgctttggcccgtctatattaggaacagatatgtgatctccgttggatgaaaaaccgtagccgataatttctgccagtatgggggctcctcgcttaacagccgattcataactttccagtaccaggctggcgcctcctccgctgggtacaagcccgtccctgcttttatcaaaaggtctggatgctttctggggttcagtttcccgattggaaaatgcacttaacccgtcgaagctacccactgagaatggatttacttcctgtgcgccaccacaaagaatgcagtcctgcaatcccgatttgataagcagatatcccatgccaatggcgtgggaaccgcttgcacaagcaccggagattgtgaagtttactcctctgagtttaaagatgactgacagattcatcgacacagttgaattcatcgactggaagatagaaccggaacctaccagaacggtattcttcttttcccggataatatccacagcattaataatcggtgcagtgctactatcatttccatagagcacccctacttcgttcgcttccaggaatgcttcatcgatacctgcatttttgaaggcttccacacttgccagataggcatattctccttgttcaggcagacagagacgttttcgtctgtccagcatctttttgagatcaggacgctccaataagccggtcagtgcggacagatatcccatctctttccgttgaggatcgatgccgatgcctgatttaccgttatataatgagtctgttacttcgctcagattcttgccgatgcatgagtaaatccccattcctgtaatgacaactcttctcatgtatgcagtcctccattgattgaaataacctcacctgtaatataagaggcattgggagagactaaaaaacttacgagatcagccacttcttccggttcgccgaagcgcccggcagggatctgttttttccattcgttctcgttgatatcttcggtcatttccgtgcggatgaatccgggcgccaccgcattgacggtcacgtgcttctttgccacttcctgagctaatgccttggtagcagcaatgacacctcctttggcggcagaataattggtctgcccgggcatgcccttgatccccgataatgagacgatgttgacaatacgtccgaagcgtttgacaagcatgttcttaagcaatgcctgggtgacataaaagaagccgttcagactggtgttcagtaccccgctccattctgcttcggtcatccaaagcatcagattatctttgcggatgcctgcattatttatcagcacctcgatatattcatccggatgttgttcgctccagttatttaaagcttcggatactgcctttggatcagtaacatcgaacttcaatagttctccgtcgcctcctttttcacgaactaattgcagtgtgtttgccgcttccttatcgttgctttgataatttatcagcacggtatatcccattgctgccaacttgatgctgacagaacgtcctatgccccggcttccgcctgttattaatgcgtatttcatttataaattgaatttcttatttttcaagtattcactcatagcctctatttccttgtacttgggagtatcctgggtaaatacagggaaaaatgcccggatctcattgtatacgcaacgcgattccgtactgagcttttcctgtatctttaagtaatctacagcctgtacgatccccataaacaggatgctcataacctggaaagaattctctatgactgttttggctattaatgcagaattagttcccatgcttacaatatcctgattatcattgttgtttgggatactgtgtatatacatgggattagataacgtctgacactcggctgttgtggaagtagctgtaaattgtgaggcttgtaacccataattcaatcctaatactcccaaattgacaaatggaggaagtattccgttgatgcgatcatggaacagatagttcaattggcgttcacttagcattgtcagtttcgttatggctattttcagtttatccatttcaaaagagacgtaatcaccatgaaagtttccgccatgatatacattttgggtttccggatcaacaatcggattgtcgcaagctgagttgatttcgtttatcaatacttcttccgtatttataagggtgtcataaaccggtcccaatatttgtggagtacatcttaacgagtaataaggctgtactttatgttcaaaaatcttttcttcatgtttctgtccgtacagttcattctctctcttgagagtacatttactgtcggacatccagactctcatcatttcagctatcttttgctgccctttatgaaatttggcatcatttagcggctgagaaacaaaatcatcatacgatgcggcaatttcattcatcattaccgaggcgcatacggaccagttgagcaattggcgggcataaatcaagttaacaatgccaatgcctgtcataacagaagtgccgtttgttactgaaagcccttcacggatatgtatggagaaaggtttgagatgattcttctcaagtacttggacagtgggttgtagctgcccttgatagaacacttctccttcaccgatcagtgtcaacgctatatgcgccaattgcactaaatcgccactggcacctacactgccatgctccggtatatacggaaaaatatccaggttaatgaacttgacgagtagttcgaccagctctgtatgtatacctgatttcccttgaagaaaggtgaataatctggcaatcattgctgcttttacataaagaggaggcaatggttttcccgctccggtagagtggctcctgatgatgttgtattgtaattccgttaatgatttatcttcaatcctatattgagccataggaccgaaccctgtgttaattccgtaaataattttatcactggagaattccttcaagaaacgaaaactcttatctacttcttgaatacattcatcggaaataattactttttcatcatcaaacagtagcttctggagcgttcccaaatttatatatttgccgactatcatagtatacttcattgatatagactgcaaaaatagctattttatatcaataatagatgtctatgcaaaataaaacttttttcagcaaggtggtttttgctgaacctgaatatattgtaaataatgttattcagtaacagcttccaataattttatctcatggctggtatcattcgtattgcagcttccattgaatttagcctgtgattctatttccaatttggtggtatagatattgccctgcatcacacagttggctttcagggtgagttcttccttcacgtatgcatcaccgatgatagttccgtgaaggcaagcgtgtgtacaagacaggttgccgtgtatttttccttccggaccgatgactatttttccggtacaccggatatttccttctacagttccgtcgatacgcatatctccatcgatggaacaatcacctttaattaaactttgactggaaagcgtggttaatttattgcttaccttgtcatctattcctttttttgagttaaacataatgagtgtgcttttatagttttttatccttctacacgagttacttgcttaatgttctgtatctgtttcagattattgcagatggtttttacatcatccacatcatgcacgtacaattggatgtttccttcaaaaataccgtctgttgtttcgatggacaacttacggatatttacattcagctgacgtgaaataacctgcgttacttcgttcagcaatcccatggcatctataccttttatatatatattcaccaggaaggagagttccttatgggtatcccactctgtagctagaatacggtttccgtaactgctcttcaaacgtgcggcgacgggacactggcgtttgtggataatgatacggtcgttttcgtccatatatcccagtacatcgtcacccggaatggggtggcaacattctgccatgatataattcttctggatattctcttccgtcagtttcaggatttgcttcgtattgattttctccttttcttgcagtggtttttcttcaatcggttctttgttgtccttgttaccgccgaacgagaaggtgagaaacttcttccagttagttccttgtttctctttcagggcatttttatccaggtcgcccaatacgatctttttattgccgatggctatcagaaactcgtcccggtttttcatattatgggctttcaccaacttgtctatcaacaagtcgtccaatcgcagttcttcttttttgaagaattcgttcagaagggtttcgccttctttttggctgttcctttgctctttgcgcaggatggcggctatcttggcacgggcacgggcagtagtggcaaatacttcccattccggctgtacgcgttgtgatttggaagtcagaacttccacctggtcaccactttgaagcttgtggctcagagggacaagcttatggtttacttttgcgccgatacagtggctaccgatgtcagtgtgcagggagaatgcaaaatccagtgccgtagagttctgcggcatagtcttaatttcgcctttgggggtaaacacaaatatttccgatgcaaacaagttcagcttgatggtatcgaggaagtcaatggcatccggttggggatcatcaagtatttctttgatggtgcgcagccatttatccaattcaccttcatcttcgctgcctccgccatctttatatttccagtgggcggcgaaaccttgttcggctacgtcattcatccgttcactgcggatttgtacttcaatccattgcccgttgtttcccataagggtgacgtgcaaggcttggtaaccattggctttgggatgactcacccagtcgcgcagacggtcggggtggggtttgtatattttagagatggagacatagatatcaaaacaatcgttcagttcttcgtccgcatttcgtggttcaaagataatacgtacggcaagtaagtcatagatttcttcgaacggtacatgcttggtctgcatcttgttccagatggaatagatggatttaacacgcgcgaggatacggaatttcagccccattttgtccagctgggcacgtatcggagtagtgaaatcattgaatactttatcacgttcggttgctgtggctgccagcttttcttcgatttcctgatactcttcaggatgttcgtacttgaaactcagattctccagttctgtctttatcttgtacagtcccaggcgattggcgaggggagcatagatatacaatgtctcgcctgcaattttgaattgcttgttgggaagcatcgaacctaacgtgcgcatattgtgcagccggtcggctatcttgatcagaattacgcgtatatcatcggacatcgtcagcagcaacttcttgaagttctctgcctgtgccgaagcgcggtcaccgaaaataccaccggatattttggtcagcccgtctacaatctgggcgatcttcgggccgaatatgttttctatgtcttctacggtataatccgtatcttctaccacatcgtgcagcaaggcggcacaaatggatgtagaaccaagacctatttcgttgcatacaatttgtgccacagcgagggggtgcataatgtaaggttcgcccgaacggcgtttgatgcccttatgcgcctgattggcaaagttgaatgcctttgttatgatctcaatacgcttgcggtgtttggttgccaagtagtcgtttaacagttgctggaaagcctgttcaatcatttcttcttcgactttttctttatctttctggcccacattctcttccatatcctgttctcctttcttcagttgctgcaaaaataagcaattttcaacatcacacaagtatttgtgcctttatttatatatcttcaattgctttccggcagaaatgttggtattgcgcaatccattccaactctgaagttgtttgacggtgacgccataacgacctgcaatggcacccagtgtttcgccactccgtatcttgtggtaagtcagcttcccgttgccggttgtagcgcgtcttgctgtagagcgggtttcggggatggctacagtacggcggtttttgaataattcattagaacggtgggcgtagatggtgtcctggctgtcgataaatgtactgatgtaattcattggcaggcggagggtttgcgccttgctttcaccgggaattatattctttttatattggggattaagacttttgatctcttccatactcacgctacagatatcggcaagctgttcgaaatgtaagttttttgttacctgtactgtatctgttgcgtcgggaatgttggtttccatggggcagatgttgtgcttgcagtagtaggtcatcacatagttggcggcgataaacgcgggtacatatccacgggtttctttcggcaggaagttatagatttcccaataatccgttttccctccggcacggcggatggccttgttgatggtgcccgggccgcaattgtaagcggcaatcaccagattccagtcttggtaaatggcatacagatccttcagatagcgggcggcagcccaggtggccttgattggatcgcagcgttcgtcaacgagactgttgctttccaggccatacatttttccggtagccagcatgaactgccacagtccgcaagcgcctgcgcgtgaacgggcggaagggttgagagcggattcgataatgggcaagtatctgagttcgagcggcagtccgtaggtgtcgagcgcttcctcaaagataggcatgtagaaattgcaggcgctcagcatgaacgatacgttattgcgtaagcgtcctgtgtacatatctatgaatttacgtacaatttcattgtatggcatttccatcacggcaggaatacggctgagacggtcgatgtagacggaatcactgaaaaacggattctcagtggaagtactgcaatctttgcctaaatcaatataattctttgctttccagtcgttgagcaggctgtccagcggataggtcatacttggaggaagttcgatgctttcctttctttccgttccgttgtcgcggataagtacatccacgctttcttgcgcttgcacctggaaggtgaagagtgacagacaaaacagaaacggagtggcgataagcttcttcatatttacagatttattcttcatgtgtgattattctttggtatggctttattctcatttaaaaacggaaactgcattgcagtccgacggatttattggaggtaccgctgctatatgggttgttgataacagccggttctattctcatactaaggtcgggcgttatgtcgaaattagataattccgcatctacatacgcatcgatgactgatatcagataaacaccgataaaagcgaagatactcaggtcgcgatatcggcggtatgtatcctttcgttttcggagcgtttctactatttgtgtctgggaaacccggtcgatgtatcccggggggagcagatcagtgatactgctggcatcccagttgcctttggaggcgtccttgtacgcttgcatgtagtctttgtacattttcccgttccaagtcagtgcatatgcacatccggcaaagccaccatatataataggtagtttccagtatttccggttgtatatttgtccaccacccggaattaccagggcgagccatgtcgctttggtcggattgggaataaaaacttttttattgagttccttattcagactgtccgcaggcgtatcgggcacttgcggggtgggggcggaggttatctccaacaaacgctttttgttttcggcagcaatactgtcggctactgcgaggctatcagcggttgaaacccgttgcagaataggatcgcttagtgcatccaggctatccggtacaatttgcggtatcttccgcaatgtgtccgcaagctctttttgctgtcgtttggcagcggcacgcggacggtcctgcccatacatagcaatccctgccgtctgcacgaggcaaagcagcagggcgatacaccattgatatgttttagttcctttcgtcatttatttttttagagtatcgagtatgccgataatacgttctaaatcctcttcgttattgaacgggatactgattttaccttttcctttctccgaacaggtcagctgcactttggtgctgaagaagccggatagctgttgtttcagcatattaaattcttcgggcaacttggctcgtttgggagctattttgcgtccgccgcttttcacggtttcgccttcgctcagagattttactaattcttccaccttgcgtacggagtatccgtgctcgatgatttcttcgaatatcttcacttgcagcttcggatcagccagagtgacgagtgcacgggcatgccccatgtcaatctgcttgttttgtatggccatctgaataggtgcaggcagcttcaacaggcgcaggtagttcgcgatggtagtgcgctttttacctacacgttcgctgagacgttcctgtgtcaggccgtattgttccaacaggtgctggtaggcaagagcgatttccacagaattcaggtcttcgcgctgtatgttctcgataagcgccatttccatgacgttttcgtcgtcggcggtgcggatataggcggggatgcttgtcagtccggcaagttgcgaggcgcggaaacggcgttctccggcaatgatctgatattcatcgtccgagagtttacgcaaggtgatgggctgaatgatacctatttcagagattgagtcggcaagttcctgaagcgccgtttcgtcaaattcatgacgtggctgattcgggttgacgacaatcttcgacaactctatttcgttgatggaagaagagccttcggtctgcacttcgtccattgaaagcagagcgtcgagcccgcgtcctaatgcatttcttttttgtgccatggttcttcgtttttaagttaattgttgcgactaatcagttctttggcaagtgccatgtggtttttggctcctgtggagtctgcgtcatacaagatggtaggcagaccataactgggagcctcgctcagtttgacgttgcgttgcaccacggtttcgaacaccagttcctggaagtggcgtttcacttcatcgtaaatctggttggcctggcgcaggcgtgagtcgtacatggtcagcaggaaaccttcgatttcgagtgccgggttcagtttcgacttgatgattttgattgtattcagcaatttactgatgccttccaatgcaaagtattccgcttgtacggggataatcacagagtcggctgcggtcagtgcgttgatggtaatcagtcccagtgagggcgagcagtctatcaagatataatcaaactcttccttcagcggggcaagtacttctttcaatatcttttccctgtttttcagattgagcatctctatctcggcgcccaccaagtttatgtgtgaggatatcactttcagtgtatcaatctcggtgtcatgaatcgcttcgcggacatcagcccggtcgataatgcattcgtaaatagtgcattccgactgcttgatgtcgacacccaaaccggaagaggcgtttgcctgcgggtctgcgtccacaacgagcactttcttttccagggtggcgagtgaggctgcgaggttaatcgtagtcgttgtttttcctacaccacctttttgatttgccaaagcaataatttttcccataatcttagtgtttattggcagcgaaataagtgataattccgtattgcgcctactaaaaaagagaaagattgcaaaatctgttgataagtcgccttttttgttaataactcaaagccgttttatttcatttcgacctgttccggcacttttcgttctcttgttcagcttgcaaatatacgtaattatcttgaaatgaaatatcttttttgtctcgcttgcagaagattaagatttgttttaagtgcctgtccgcatttgggatgtggtttgtgcgaataatcatgcgttctgcactttcatctctttcagcggctttaggccgttgtgtgtaaggcgtttagactgaaatctccggtcggggacggctttcagtgctttcagcctgttaccgtattaatatcctttgtttcgtcttccggcttatttggggtctgtgcccgttcgcgctccagcgtttcgggacgtagcatttcgtgggggaagtatttgcttagcgggtaacggaagaaatccatgttctggcgtagccttcctgttaacatgcgatctggtttgaagtagatgcgtgaaactcgcaccttgcccggcatcacgtcgtcgggatgttcgaatccctcgcttgttatggcgaggttgaaggagccaagtcctctgatagtgacggactctccctcgctgagtgcttcttcgatatatttgggtaggtccaccagtacgctttgcacgtcgccctcacccatgcctttgcgacgggccatgcgttgcgccaacttttcggtagttactccgccacgtggttgcagggtacgttgcacagcgtagtacagttgcttcattccttccttggagcggaagagtttctttcttactaaataaatcattcccatatccttgttcctgttgattgatgttgttgttgatatctatgcttttcaatgtcagtagcatagtactttaatgcctgaaactcatttccctatgaactgtagctccctttgctttgctgcgtaagatggcatcttgtgttgtttaagatggtatcttatactgcacaagatggcatcttgaacagcaaaggtaaccatgcttcagtagatatgcaagctttttgcgggggaaaggtaaggaatgtgtctgtgatggataaggggatgcttcgtggtgcggacgttaaataagcgaaacttctcctccttttgccacttaaagctggatggtgaacgtgcctctttatgtggtgggaggcttcttccgttagggagattttctccagaaacattaccaagttattttttaagtgttacttagttgtttttttcgcctactactatacttctcttggtcatcttttgtgcattcgtaacggtataggaatgaataagactcaccacagattacacagattcacacagatttattaatctaataatcagtaaaatagaatctgtgtcaatctgtgtaatctgtggtgaattaattcataaccctacagaaatgcacaaaacgtgaccaagagaagtataaattgagattggcatatacctatatattggtaaaagccggagcggtaacacatattaagtaccagagtttgcgtttttaatatgagatacatatcttcgcagcctattcaaatacttgtcgattaagaaagtgaataacagcagaaagaagagagtagttatagcgtgggtgctgatgatggcacttctgccgttcttcgtggtgaaggcttttcaccatcacgaggacgagcatgctgcttcctgttcccatgcagatcatccgcgccattcgtccgatgattgtgctatctgccacttttctctttctcttttcacggaagcgcagtctgttgacttccgttgcatcttaacgcccatcacatttgagcaggttgttcatcaggataagattgtctatacactctcttattcacattatctacgtgcacctcccatagcttgattacataatttacattcatgtggagacgggcttttatagcttgcctctcattgttttattctaatcaagattgtaatcaatgcgtataggaattattccgggcgtgctggggatgttgtgtacaaccctttccgtccatgcgcaggaatctgattcagtccgtaatgtagctttgcctgaagtcgtgatagcggaaacctatcaacagcttcagaacaaaaagacagcacttacgctcgaagtggctgacagggatttcttgcggaaacatttcacgggtaacttcatgcaggctatggaaaatattcccggcgtgcaggctatggatatcggttcgggattctccaagccgatgattcgtggcatgggctttaatcgggtggctgtattggagaatggcatcaaacaggaagggcagcagtggggtgcagaccatggtctggagctggatgctttcaatgtggatgccgtgaatgtaatgaaaggtcctgcttcgctgctttatggcagtgacgccatgggcggagtgattgacattgctccggtgcaggtgccggcagagaatatgttgtttggtgacgtgacgctgttgggtaagtctgtgaacgaaaccataggcgcttcactgatgctgggtatcaaaagaaatgcatggtatacgcggttgcgttactcggaacagcgctttggagattaccgtatcccggcagacacgattgtttatctgactcagaagatgccggtctacggtcgtcggctgaaaaatacggcgggatgggaacgtaatgtcaatttctttacccaatatcagaagaaaggatataagtcgaatcttgctgtgtccaatgtttttcagaagacggggttcttccctggagcacatggagttcccgacttgtcacgtctggaagacgacggtgacagccggaacatcgatcttccttatagtaaggtaaatcatctgaaagtgaccactcatcagcagtatgcctgggagaagtttattctgtcgggtgatatcggttatcagaacaatcaccgcgaggaatggagtgcgtttcatacccattacggaacacaacctctgccggaaactgatcctgacaaagaactggcctttaatctgaatactttcagtttttcggcaaaaggacggtgggtcggttcttcttcctgggaacaccggatggggtgggactctcaattccagcgaaatacgatttccggttattctttcttgttgccggaatatgatcgttttactaccggtatatcctggcttacgacgtatcgtccggataatacgttatccgtcagtggaggtgtacggtatgattatggtcgcatgcgtgtctttgcccatgatgatccttacctggctacttatttgcaggaacagggatatgatgaagagcaggtggagttctaccggtggaacagccgccgggtaaacaggaactttggcgactattctttatcattgggtgtggtatggacgccctcgatgcggcatcagctgaaggtaaatgtcggacggagttttcgtcttccgggagctaatgaactggcttcgaatggtgtgcatcacggcacattccgtcatgaacagggagatgccacactttcgtccgaacagggttggcagatggatgcttcttatcagttgaagtacgggagatggtccgtatatgtttctcctttcgtcaattggtttagtaattatatctttctgcggcctacgggggaatggtctgtcttaccccatacgggacagatttaccgttatacgcagacggaagccttgtttgccggagcggaggcgagtgtggaactaactgttttgcccactctcaactaccgtatatccggtgagtatgtctatacctacaattgtgatgaacgtattcctttgagtttttctccgcctgccacgctgcgcaacacgctcacctggcaaaggaagcggtatatgctttatgccgaatggcagagcataaccaagcaaaatcgtgtggatcgtaatgaagaccgcacgccgggtgcaaacctctttcatatagctggctctcttgatttacccgttgccggaacggaagtggagattactctgactgtccgtaatttattcaatacgcggtattacaatcatctcagtttttatcggaaagtggagattcccgaaccggggcgaaactttcaattattaattaaagtaccatttaaaaaattattcaaatgaaaacaagattttatttcccgatgattatttcccttttagtgataagtgtttcattacttactgcttgcggagacagtgacaatccgcttagtgatactacaaaaccggtgattgatcttaaatcgcctgccgaaggcggagtgctggcaataggcagtgaacacggagtacattttgagatggacttatcggatgatgtcatgttgaaatcctacaagatagagattcacaataacttcgaccatcattcgcatgatacccgcactgctgagacgactgttgatttcacctttaataagtcttacgatgtttcggaacaaagaacggctcatatccatcatcatgatatcgtgataccggctaatgccactccgggagattaccacctgatggtttactgtacggatgctgccggaaacgaggcgcatgtcgcacgcaatatcgtgttgagtgcgacgggaggagatgacggacatcacgaagaataacggtttacgctggttttattcgatatatcgaatgaaacgcaaactctggtacaacaaaagcaaagtattgtattaggtgctttctttatttttgcctacttttgcatagaaaataaagatgaatatggaaaatcagagacctttaatattggtttccaatgacgatggtgtcattgcaaaaggcattagtgagttggttaagtttcttcgtccgctgggagaaatagttgtgatggcgccggatgcgccgcgttcgggtagtgcaagtgcgctgactgtaacggaacccattcattaccagttggttcgtaaggatgtagggctgacagtttataaatgttccggtactccggtagactgcataaaacttgccttgcatacggtgctcgaccgcaaacccgatctgatagtcggtggtatcaatcacggcgataactctgccgtgaatgtgcattattccggtacgatgggagtggtaattgaaggttgcctgaaaggtgtgccttccattggtttctctctttgctgtcatgatccgaatcctgattttgagccttccggtccttatatccgtgagatagcccgtcaggttttggaaaaggggctgcctccgttgacttgcctcaatgtaaatttccccaatgtacaggaactcaagggagttaaagtctgcgaacagtccaaaggacagtggaccaatgaatgggagaatttcgcgcatcgcggtgatacccattactactggctgaccggtgagttccagaataccgattccgataatgaaaagaatgatcattgggcactcgataacggctatgtagctattactccgaccaaggtggatgttacggcttacgaacttatagatgaactgcaaagctggttttgaagaagttgagagttgagagttgaaagttgagaattagctgcgctatgatgctgcataataattctcaactctcaacttccccaactctcaacttcataaaatttttaattttatgaagtattacttgattgtcggtgaagcttccggtgacttacacgcgtctcacctgatggctgctttgaaggttgaagatccgcaggcggaattccgtttcttcggaggcgacctgatggcagcagtgggtggaacgatggtgaagcactataaagagctggcttatatgggctttatcccggtgttactgcatttgcgcacaatctttgccaatatgaaacgatgtaaagaggatattgtggcatggcagccggatgtagtgatactggtggattatcccggttttaacctgaatattgccaagttcctgcgagctaagacgcaaatcccggtctattattatatctctccgaagatatgggcgtggaaagaataccgtatcaagaatatcaagcgggatgtggatgaattgttttccattctgccgttcgaggtggagtttttcgaagacaagcatcattatccgatacattatgtaggcaatcctacggtagatgaagtgaccgctttccgtgcggaacatcctgaaacgtacgatgattttattcgtgagaccggattggagtctaagccgataatcgctttactggcgggtagccggaagcaggagataaaagataacctgcccgatatgcttcgtgcagcttctgcttttcctgaataccaattggttttggccggtgcacccggtatttctcctgactattatcatgaatatataggcggtgcgaaagtaaagattcttttcggacaaacctatcgtttgctgcaacaggctgaagctgcattggtaacttcgggaactgctacgctggaaacggccttgttccgggtgccgcaggctgtttgctatcatacgccgataggaaaagtcatttcgttcctgcgccgtcatatactgacggtaaagtatatttcattggtgaatcttattgcaaaccgtgaagtggtgaaagagctcgtggctgatacgatgacagtagagcaggcccgtgccgaactggaacgtatcttatataataaggagtatcggcaacgaatgctcgaaggctatgagtacatggcatcgcgtctgggagatgccggtgcgccgaagcatgctgcacaagaaatgatacgcctgttacacctgcattattgtagtgggagctaaaggagtagaggagttacataatgaaagtctttttgtttcaaaaggctataaaatagttaaaagagataaagccggtgcagtaaatgcccggctttcgtattttatagtcagaatacacgaaagattatgaactaacaatttttacgaaaacaagcaaaaggactttgattatgaagagattacattggctattttttatgatgtgcttggcagtactacctgcgttgcaatcatgcgatgatttagatgacggatactctatcggtgatttctcttatccgaattggagcaccgtacgcgtgaaggggaatactttctatctggaaagtgacacttggggaacgctttggcctattaatactaatatgggttggtatcagcctgtagacgggcagcgtataataacaatctttaatcccatctatgataattatgaaggatatgatcatgccgtgaagattgagaagatctggcatgccctgacgaaaagtgtggaaccgctgacatcggagaatgacgaagaatatggtaatgatccggtatttatttataaaggggatatcactatcagtgggggatatatgaacattatctttatgcagaatctgccgaagaattcgggtacgaaacatcgtatcagtctggtacaacgtgcagaagatgccgaggttcctttagcagaagaaggtaatgatgacggatatatccatctggagcttcgatacaatgattatgatgacctgagtggagttcgtgctcccggattagtgtcgttcaatctgaaagaattgaatataacttctgaaacgaaaggtatcaagttaaagctgaattcagaagtaaacgatgaagtcgaaattacctttgaaaaacaatcggataattccgcaaaagtttctaacttagatttctcaaagatgcaattgaagtaaagtaaagtgttttgtgtgtgaggccgggtgaatgtgaattcctccggcctttttttatttcattaacattaaaacgtagaggtaaaccactgctgcggggattgccagtaaagcactgtcgaaacggtcgagcattccaccgtggccgggtaggatgtgacccgaatctttgatgcctaactggcgcttcattagcgattccgttaggtcaccccaagtaccgaagatgacaacaaccagtgccagtccggcccattcccaaacagacaggaatgagaagtagtgggcgaatacgaatgaagaagcaatagagaacacaccaccaccgatgcttccttcccatgacttcttgggggaaatacgttcgaacaaacgatgcttgccgattaacgagcctacacaatatgctccagtgtcactcagccatataaatacaaagatggaaagtggtaggatgggattgtaggtcacgctgctttctgccgggttatattggaaagccaatacgttgagcaatgcaaacggtaatgctacatacagctggcttaacatggaaaaggcccagttgccaatgggattcttctttttcagatacagttctgtaattatcaggtaaagcagtaatgccagataaggcagaaatacctgggctccgatagtagattgacaaaagcccattacggccaagaagagataagcgcctcccaaagcggtaattgttttattgatttgtacttcaccgttttggtttatcaggtgggcaaattcatgtacgctcagtgcaccgataatggtgaacaggataccgaatgaaagggggctgtataggatacagcccaccaatactactacgaataacacacctgtgatggcgcgttttaagaaattgcttttcacggtaattccgttttttagttctttattcttttgcgggtcgttctacagaaactttggtaccttctgctgaaacctttgttttgccggtttctgttccgccttcaacattgttttcttcttccgcttttacttctttttcgctctccacagcttctttggcggctgcgtcttcagctttcttaagttcttccgaaatcttgtttgcactgatttcttcagaacgggaagcccaaggacgttttccgaagatttcttccacatcttctgcaaagataacttctttatctatcagcaactgtgacagtttggcgtgcccatccctatgttcggaaagtattttctttgcacgttcgtactgttcgttcaccatattcttcacttcttcgtcaatcagttcagcagttttttcgctgtacggacgattgaaagaatattcatcattgctataataacagaggttgggtagcttttcgctcattcctaggtaggcaatcatgccgaaagcctgtttcgtaacacgttccaggtcattcatggcaccggtcgaaatacgtcccaggaacaaatcctcagcggcacgtccacccaatgtggcgcacatctcatcaagcatttgttctttggtggtaatctggcgttcttcgggcaaataccaggcagcgcccagtgcacgtccgcgtggaacaatcgttactttaatcaacggattggcatattccagcaaccaggagatggaagcatgtcctgcctcgtggatagcgatggaacgacgttccgcttccgtggtgattttcgtcttcttttccagaccaccaacaattcggtctacggcatcgaggaaatcttgtttgcctacgaactttttgccgtggcgggcagcgatcagtgcagcctcattgcagacattggcgatatcggcaccggagaaacccggggtttggcgtgccaacaggtctacgtctactgtattatctattttgatggggcgtaagtgtacgccgaatacttccttacgttcgttgaggtcgggaaggtctacatgaatctggcggtcaaaacgtccggcacgcagcaaagctttatccaaaacgtctacacggttggtagcagccagaatgattacaccgctgttggaaccgaaaccgtccatttctgtcaataactggttcaatgtgttttcgcgttcatcatttccacccattgcggcagctttggcgcgggcacgacctacggcgtcaatttcatcaatgaacacgatacagggggctttttctttggcttggcggaacaagtcacgtacacgtgatgcacctacaccgacaaacatttccacaaagtcggaaccagccagtgagaagaacggtacgttggcctcgcctgccacagctttggcaagcagggtcttaccggttcccggagggcctaccagcaatgcgcccttgggtatcttacctcccaggtctgtatatttttgcggttctttcaggaattccacaatttcctctacttcctgtttggcctcggcaagtccggctacatctttgaatgtaacttttacgggagtccccttctcaaatagttgggcacgcgatttaccgacattgaaaatgccgccaccacctgcaccgccaccaccgctcagacggcgtgacatgaatatccagaaacctataaggaaggcaataggcagaatctgccacagtacgaccccgaaataattgcgtttcttttcgtagttgatagaaccgtcaaagtgcagttcatctttttccttttgcaggaagtttcccaaactttcacgagatggtgcttcagttgtaatcatgggatttttacccactttactagagtctgcctgaaatacgtttttgacgtattgtggcttgatatatgcttctacagagttatcatcataaccgatgattttgctcatatagccgtcacgtacgtattgctggaattcgtcataagagacacttttgattccggtactgttttcattggtgatgtacaagcccagaagcatcatagctatgatcatatacagccaattcaggttgaacttgggcatatttaccttattgggctttttgttagcgttattattattgttgtccatagggcttattaatcaatgtcaggtatttgggttaatttggcgtcggcccagagattttccagattgtagaagtctctcgtttcgggtagaaacacatggaccaatatgtcggagtaatccattgctacccattcggcattgcgcaatccgtctattgcaaaaggtttgctgttagcgcctttgcgggtgaattcctttacggactctacaatggcggtcacttggcttggggagtttccctgacaaatgacgagatagttgcagatagtatcgccaattttagaaagatctgctattacaatattttttccttttttatcttgtataccttcggttatttgttgaatgagtttctttgattcgttcattacttattattaaaattaaacagttgacaaatatacgctgaattcttgtatcaaacacctaaaagggaaaaagtctttcaatttttgattttttttaggtatatatttctttggcatacggcatcttagcagattttagagaaaaaaacacgagaaattgttttggattatcaaattctttgtatctttgcaaccgcaaaacaggaacgacctgttattgggctatggtgtaatggtaacactacagattctggtcctgtcattcctggttcgaatccaggtagcccaactaaaaaagctgcgaatgtaataagttcgtagctttttgtgttttgtcccattcgtgtttttgtagcaattctattcaaaataattaaaactatggcaaaagagttagaactcaagtacggctgtaaccctaatcagaagccagcccgcatttttatgcaggagggggagttacctatcgaagtcctgaacggacgcccgggatacatcaattttatggatgcactgaacggttggcagttggtgaaagaattgaaagcggctaccggaatgccggctgcgacttcattcaaacatgttagccctgcaggtgcagctattggtctggatttggatgagacaatgaaacagatttattttgttgacaacttgccgctttctcctctggccagtgcatatgtgcgtgcccgtggtgcggaccgtatgtcatcttacggagattttatagctttgagtgatgtctgtgatgaggcgactgcccgtttcattaaccgggaagtatccgatggcgttattgctccgggatatacggatgaggcactcgaaattctgaagaacaagcgtaagggtacttataatgtgattaagattgatccttcgtataaacctgcaccgattgagcgtaaggatgtgttcgggataacttttgaacagggacgtaatgagattcagctgaatggcagcgaactgttcgctaatattcctacgcggaataagacttttccggatgctgcaaagcgtgatttaatgatagcgcttattactttgaaatatacgcagtccaattctgtatgttatgtgaaagacggacaagcgattggtatcggggcaggacagcaaagccgtatccactgtacccgtttagctggaaataaagctgatatctggtatcttcgccagcatccaaaagtattgaacttgccctgggtagagaaaatccgccgtgccgaccgtgataatacgattgatatttacattagcgatgatcatgatgatgtgttggctgacggtatttggcagcagttctttacagaaaaaccggaagtgctgacgcgtgaggaaaagcgtgaatggctgaatactctgaaaggagtagctcttggttcagatgctttcttcccgtttggagataatatagagcgtgctcacaagactggtgtggaatacattgcccaggcaggaggttcagtacgtgatgatcatgttattgaaacctgcgataaatacggtattgctatggcatttacaggtattcgtctgttccatcattaagataagatatatatacaaagagggtgtttcaaaatgttgaaacaccctctttgtatatataggcttaaaattattcggcgctacgaatggaatcgtcgataaccttaatcttttgttttaccaattcaatatctgccttcagtttttctactttgcggtttagttctgtcagcaggctattgcctttctttgaagaagctgtcaggaagccaagattattttcataagtctgcaattcgttcttcatggcatctgctgcacgtaccagtttctcgcgttcgcgatagagtgactgcgggctgccttcctgaatactgctgatgttggatttgaagttactcaacttcttattggcagcgctgatgttgaagtggtcgaacaatttgtccacttgtccgtggtattgcttatacaaacggtctttttccttgaaaggtacatggccgatgttgttccattccttcattaattcgcgtaccaactgagtagcttcatccgtatccatattctcatcaatggcacccaacttctcgatgatttccttcttcttattcaggttgtctatctcaacggaacgttgggaggaagtagccttattcttttgttcgaagaagtagtcacaagcggaaataaaccgtttccatattgcatcagaatatttctttgctaccggaccgatagtcttccattctttttgcagtttggttagttcgtcagcggttgctttccagtcggtgctatctttcagagcttcagctttctcacaaagagcacgtttcttatccaagtttgcattcatgccctctttcagggctttaaagaattcacctttcttgcggaagaaatcatcacacgctttacggaaacgttcgaatatcttcacattcatcttttgcggtgcaaaaccgatggtcttccacttgttttgcagggcaatgatctcctgtgttttattgtcccacgcagcaaaattggtcaattcgttgtagtctattgcttcaatgatttcacaaatcactgttttctggtcaagattatgctgctctacttccttcaatgattcgaagtgttgttgatgacggcgatttacggctgtggaagcagctttaaatcgattccatacttcgtcacgcagttcttttgcaactggacccgtgtcacggaattcctgatgtagcttttgtaactggtggaaagctgacactacatctgcttcatcagccagcttttcggcagcttcacatagatgtgtctttatttccaggtttttcttgaagtcatattcgcggaattcattattcagcttcaacagatcgtagaacttctccacatagagttgataactcttccacagttcgttgactttggcttgcggaataagtttcacttcattccactgttgctgtaacttcttgaattctgagtaggatttgttagcatcgtcgggtgactctaccagttctttcagttcctcgataatggaaagtttgatttgcaggttcagctctttttgttgttcctgttcagctgacaatgcacctctcttttctttaatgacggacatgatatttttgaattcctcttcaacagcatccgttgtcggaatgaaattctctgctactcccccgttttcgataaacagcttctttgtcgcttcttgttcggcattatgaagcttatagaaagcctgtttcagactatctatctcctgtttgccggcgttttccacatctgcggaaatctctttcaatttagccaggatttcttccttgcttagcttttgtgcggcttctaccggctgctcttcctgctttgcttcttcagccggagtttccgtcagagccggttctgaaacctcagctgctttcttttcttcttctaattccaccgccttttcggggagattagtgtcatgagtgtccatcattgtacatacattttaaaaaacggttttacccgttcgggttacattaggtcacaaattaatgaaataaaacaattacttcatacttttttccttagttttttttcatttttcttgttttaggatagaagtacggtaattcccatatataacatcatgcctataatatcattggtaatcgcaataaacggaccggtagcgatggctgggtctaccttcaacttttccagtgtcataggtaccagtgtgccgaagatagatgcgaacatcactactgcaaacaggctgatagaaacggaataggtgacggtggcagttgcgccgaaccggacaaaattatatatatatactaataaggaaataatagtagcgttgataagggccactacggattccttggtaatttgcttgaaagtatcttttgcatccagcgagttgttggcaaggccctgtacgatgatggccgaagattgtgttcccacgtttccgcctgtaccaccgatcagcgggatgtagagtgccatctcgggatgggctgcgaaagtagcatcgaaattacctaaaatcatggaattgccgataccccccagcataccgataataagccatggcaagcgggcgctggtctggcgcattacattatcatccgtttccacatcctgggaaagaccggatgccaactggtaatcacgttccgattgctcacgaacttcatccatgacgtcgtctacggtgatttgccccacaagccgtccgatactgtcgataacaggaacggctaccaagtcatatttctcaatggtctgtaccacatcgtctacagatgtgtctacgcgtacagaaatggggtctttcctcatcacgtgtttaaccttggatacagaaggggaggtaatcatctttttcagtggaaacactccttgcaggcggttttcgtcgtcgatgacatagacataatagatctcatccaactgctcagcttgctggcgcatctctttcaggcactccggcatactccagttctcgtttacgaccaccatttcagtacccatcaaaccaccggcggtgtcttcgtcgtacttcaacaggtctacgatgtctcctgcctgttcgatgtcttcaatgtgagaaagaatttcttcctgtttctcttcatccagctcacgcatcaggtctacggcatcatccgtatccatgtagtccacaaagcgtttggcaatggtttccgacgggagtatttccaggaattctttacggacatcctcatccatttccatcaacacgtctgccgccgtttcgttatccagtaggcggtatacgaaacgtgcttcctcaggactcaggtcattgcacagttcggcaatatccgcagggtgcaggtctataaggagtgctttgacgttctcagcgtccttttgttctatgaggtttttgacattgtcaatgtattcttcgtccatctccataatctttctcctcttttttaaatgataatttagcgggctaagctgtgataattttaggcgcggattacgcggatctcacagattaaaagctatgcgctcatccgcacaatccgtgcctaaaatctttaattatcatttttgggtttcatcacttgtttctctaatctctttcaaggcctgttcaacccggttggtcagactgataaattcctgtactgatagttgttctggccgtttgttaaacaaaacgtcttctgtcagcggacaatctttgccgagtatcggctttatcgaatttctcagggttttgcggcgttgattaaaagtcgttttcactacttgtttgaacagcttctcgtcacaacccaactctttcgtttcgtttcgcgtcatacggatgaccgcacttttcactttgggtggcggattgaatacatgctcgtgtacggtgaaaagatattctacacgataccatgcctgtatcaatatgctcaggatgccatacgtcttactgcccggtccggcggcaatacgttcggccacttctttctgtatcataccggtacaacaaggtatcagttctttgttatccaacatcttgaagaatatctggctggatatattataaggatagtttcctgtcagcacaaaaggttgcccgtcgaacaggcgttggagattcattttcaggaagtcatcttcaatgatgttgtcttccagcgacggatattcttcacgcagataggctacggactcataatccaattccaccaccttcaccggacgttcttttctcaccagaaactgggtcaatacacccatgcccggacctacttccagaatggggaggccgggacatgcgtctaccgtatcggctatatcctgtgccactttcagatctttcagaaaatgctggccgagaaactttttaggctttactaatttcatttatcaactaaatcgttacttttgcaccgcaaacggagaccgtccttttgggaaagtgctgtatttgcagcccacaaaggtaatccttttcgacgaagaataacgaattctgcatgaataaactattaaaaaagacactgaagatccttttaccggtcgctttgggcggttttattctttattgggtgtatcgagattttgattttgcacgcgccaaggaggtacttctgcatggaacgaactggggatggatgctgttttcgttgttttttggtgtgatgagccatgttttccgtggctggcgttggaaacagacgcttgcgccgctcggagcttatccaaagacgagcgattgtgtggatgctatttttgtttcctatgccgctaatcttgttttaccccgtgtaggcgaagtttcccgttgcggtatgcttgccaaatatgacgatgtttcttttgccaaatcgcttggaacagtggtaacggaacgcttgatagatacattgaccattcttttgattaccgggattacttttctgatgcagatgcccgtcttccttcgtttttttgaagagacaggtacgaaagtcccttcgctggtgcatctggtgacatctccctggttttatgtcgttctttttagtatcattggtgtattagtattactctatttccttctgcgtatgctttctttcttcgagaaagtgaaaggagtggtgctgaatgtatgggaaggtgtgatgtcattgaagagtgtgaagaatataccgcttttcctcctttacacggtgttgatatggggatgttacttttatcacttttatattactttctattgcttcgcttttactgaacatctcagctttctggcgggtctggtgatgtttgtaggcggcacttttgctgtgattgtccctactcctaatggggcgggaccatggcatttcgctgtcattacaatgatgatgctatacggtgtcaatgctactgatgcgggagcttttgccctgatagtacatggtatacagacattgttggttattatattgggtatttatggctggttacatttgtcgttggtaaatcgtacgaaacagaattcataagcagaaaaaaaagaatgaaaaaaagataaataatcttgtttatttgttgttctattcttttgttgtaactttgtaattaaagaaatggaggctcggtatggaacagcaacaaaaattttatccggtaggaatacagactttctcagaaatcataggaaagaattatttgtatattgacaagactgaatacgtttatcgcatgacgcattctgcttccaaatatatgtttttgagtcgtccgcgtcgttttggcaagtcgttgctgaccagtacgcttcattgttattttgaggggaggaaagaattgttcaaaggacttgctatcgaaaagctggaggcggaatggaatatgcatccggttcttcactttgacatgagtacagcgaagcacatggataaagaacggctggacagtgaactggaaagaaaacttttggaatatgaagaaatatatgggcgaggtaaaggtgatgttgaagttaaccaacgcctgcagggggtgatacaacgcgcttatcagcagaccggtaagcaagttgttgtcttgattgacgaatatgatgctccgcttcttgatgtaatgcatgaggataagaatctgcccatacttcgcaatgtgatgcgtaacttctacagtccgctgaaagcctgtgacccttatttgcgctatgtgtttctgaccggaatcacgaagttttcccaactgagcatcttcagtgaactgaataatatcaagaacatcagtatggatgaaccttatgctgccatctgcggcattacggaagaagaaataaaggagcaaatgagctatgatctggatttgttggcggaaaaaatgcaaataatgcgtgatgaagtgctggcaaaattgaaagagaactatgatggttatcattttacctggccttcaccagatatttacaatccttttagtctgttcaatgcttttaacgatggcaaatttaactcctattggtttggcagcggtactcctacttatttgatagagatgctgaataaatttggcgttcttccatctgaaataggcggaatagaggctgttgctgcggagtttgatgctcccacggagcgtatgaccagtattactcccttgctctatcaaagcggctatatcacaataaaaggttatgacagtgttttcgacatatatacgcttgatattcctaataaggaagttcgtattggattgatgcgtaatctgattccttcatatatcacaaatgatacgttgactaccactacgatggttgtagacctggcacgtgctttatctcgtagcgacatggatgctgctttgcgtttattacagaaatttctttctacgattccttattgtgataatactgattatgaagggcattatcaacaggtctttttcatcatctttaaccttttgggatattatgttgatgtagaagtacgtactccccgtggtcgtgtggatatggtgatgcgcagttggacgactctctatgttgttgagttgaaacttgataagagcgctgatgcggctatgcaacagattgacctgaaaaactatcccgaacgttttgcgctgtgcggacttccggtagtgaaggtggggataaatttcgatacagaaaggcatacactggctgattggaagatagaatccgttaaataaattgtgggactacaataccttgtctacaagaagttaagagtttgtcggcaagaagttaactccttgtcggcaggaagttaactccttgtaatcctctgataatcagtgcctgttttagcctttgattttgcgttttttatccttgtgtgcgtgccttgttcagtgctcctatcagatatttccctttgctgttcactatactccacttggttgcgtgtattattttccagacctcgtttccgagccgtccgtagtcggacaactttaatatcgctttcgtatcattcggatcgttgatatgcagtccgtccagtgcgagcaagagacattccaggttgtgggtattcttgttgtaggcatatcccggaaactcaatgaaagaatattgcctccataccccgacatcctcccccggcgggggagttagagggggaagttctctattttcgtttgctttgttttgttctgttttgttttgttcgggattgtcggcattttcggtgaaattgtctgcatcctgcatgcaattttgagggttttgcataccatcggtctctttatcgactttgccgtctttaccgcccttatcactttcttccgtcttcaccagcatgtagggcagggactctaagtcccttttcctacgtttggttgcttcgagccatactctttggatctctacggaagtcagtattccgtgttccttataggtttctttgtcgaagaaccccttttccatcagtgtctccacaattccctgcatctcttctttcgcaatttcccttcccactttgttggtgaagagtgtacactgttcttcattccataccatgtagtatccgttttccttgtatatcttgcacactaatttcatgactgccgtttccgctttcattccatacctagcttctatcagttccatagccacttcttcgaagaagctcacctgagtaggaaaataaggtatgctattgtatatcattgccataacttcattctttaattgttaatcattaattgtcaactgtcaattgatcggtctccattccagaaagttttccagctggaagcttctccacgcctgtagttctacatcccagtagatgatgtgcccttctatatgatgtatatcgtatttccgacggaaacatttttcgtatggaagtagtgttgcttttacaaacttgaaggttccgtcctgtttgtagtatgccacgagtgcatatccatactgcatgtggctgatgaggctttcaattctgtcggtcatccatagtgctgcgtcttccgtgtaggctttttcgagcatgattcgtattttccatttctttctgagtgcttcatagattgaaacgggtttctttagttttctcattgtgtttaattttaaattattaattcttagttctttagtcggtgtttatgtcgggcataaaaaaagagaagacatcactttggggataaagcgacatcttctcgatttgcggggcttaatctttgctaaagcgggggcaaagatatagtagattgtatatagggtgtcaatatttaattgttgtccatttatttcttgtctttattcttgtttttactcttcttctccatcactttctgtagatgttcacctctccagatttctcccaattctatttctattgtcttggctgatagtggagtattgttgtcggagagaaaaagtccccattcagcacccttgtctgccaattcgtgaatggatatgttttcttttttaccgaaaaatcccttgtctctccaattgagcagttctatcatcccttcttttcgatatttgggaagtatcccttttaccactctacctttagggcgtccgggttttctcttaatctctgatacattgcctcttaaaggtgaattttctgcctgtttcaggtctttttttcaaggcttttagccatctctttttgtttcataatttcacttatttaacgtaataattaaatatatattaaatgtttgatttgaaaaacgggcaaaggtaagcgtttcttttgtttacaggtaataggagtaatagaaaaagtttttttgccaataagaaatatgagggtaatttgttgtataatagagttatacgttgtgtttataggggtgtccaaaaaacgttcgtttaatgggcgtcaatatttgagaaaaataagaaattcaaaaaggacaaaaatgaaaggatattaaatatatttatcgacaaaaaagttagactgataatcagcgatatagctgcaaaaagagcctagcataaaaatatttttattaaacattttgcacattcaaaaaatacccattatctttgtgcccattaaacgaacgattaaaaaatacttttttgagtttaatgtcttcgtttctatcttattaagttaaaaaacgatttgtttcggtttgaaagagaatatgtctcgttcaaaccgcgaagcgcacccggaactatactgaaatcctcaatagttttcttgcaagtgattgaaaatcagaaatattggtttgccgcccgtactcgtgataagcaagagtttgctgtccgaaaatccctagataagtttaaggcagaagagggtctggatcttgattactatcttcccacgcgaactgtggtatctcagctgaagtatcgccgtaagcgtactgaggttcctgttattcgaaatttaatctttatctacgctactaagcaaactgcctgtgatctttccaatatttatggtgttcgcctttattatatgaaagaccttttcactcattccatgttggtggtccctaataaacaaatggaagacttcatgtttattatggacttgaatcctgatggagtcagttttgatagcgaaccctttgctatagggaataaagtaaaggtcattaaaggggattttagcggcattgaaggtgagattgccacacaagccaataaaacctatgttgttattcgtattaagggtgtcttagtcgcaagtattaaagtccccaagtcttatctgaagctaatcaactaatcctatctaaattctcctcctcccgggaggaggagtccccgtagggggaggtggtaggttaatcatattctaatcatataccaaatgaattctttactttcttgtgcttttgagcttcaacatgtcgctcatgagctgatgtatcttggtatggacggcgaacctatctattccgatactttttgtcggttgaataaggaagttctcgttaagtccaattctcttttttcctctaagagttccgatatcgaagaagaagccaatctgtgtctggcacttttgatgggttacaatgctacgatctacgattatggagataaagagcagaagaagcaatctgtattagaccgcgcttataacattctggaacagcttccagcttccttgcttaaagttcgtttgctgacttactgttatggcgaaatttatgaagagggtttgcttcaagaagctcattccattatggatcagtgggacaaaggaactttaacttccgaacaagcggaagttatggaagaattgaagaatattgaagagaatcaatatccttttgaggtacttgattaacatactaatcatttataatttatattcatcttgaatattctatttattcttctaactttcttgatatcagtatttatagctcggatgttaattccacgtatcttgctgatatctatgcgaaagaagctttttgatataccggacgcccgtaagatacataagaaggccattcctcgtttaggtggagtttctttctttcctactgtgctttttacatattgtttggtttacactttccgtttgcttttaggctgtgagcttacttctctttatacttcttatttgttgccggaaatgcttctttttgcatgtggaatgaccctgctttatctgacaggaatagcggatgatttggtgggtgttcgttatcgtcaaaaatttgttatccagatattctgtgcatgtttattcccgttgtccggactctggattaataatttgtacggcttgttcggcattcatgaacttgctccttatattggtatgcctttcacggtctttactgttgtatttatcacgaatgcaattaatctgattgatggcatcgatggcttagcatccggattaagtagtgtagctcttcttatttttactttcttatttgtagagaaaggtctttggagttatgctatgttggcagccggtacttttggtgtgcttgttccattcttttattataatgtttttggtagtgcagaacgagccaggaagatttttatgggagacacaggaagtttaactttgggatacactttgagttttcttgctattaaatatagccaggtaaatcccaatgtaatgccatatacagaaggtgcatttgtgattgctttcagcactttgattattccttcgtttgatgtaattcgagtgatattggttcgagtgcgtaatggtaaaagtccatttgaaccggataaaaatcatatccatcataaattattggcaattggactgagcccacgaaaagctatgattagtttattgggaatgtcgtgtgctttcagtgcgataaatatattactgatgccatatgtgaataatacgataatgttgatagtggatattgtggtgtggatagggctgaatttgtggtgggacaggttacgcgatacgtttgatgaagtcgatgcagattatgagaaatgttgataatatggaggttttaagaacatgtattgaaggggctataattattgaaccttgtttatttaaagatggacgcggttacttttttgagtcctttaatcagagagagtttgaagaaaaagtctgtaaaacgacattcgtgcaggataatgaatccaaatcgtcatacggtgtcattcgtggtttgcattttcaaaagcctcctttcgcccagagtaagctggtgcgcatagtaaagggcgctgttttggatgttgctgtggatataagagaaggctctccgactttcgggcagcatgttgctgtggaactaacagaagaaaatcatcgtcaattttttattccaagaggttgtgcgcatggattttctgttttgagcaaagaggttatttttcaatataaatgtgataatttctatgctcctcaacatgaaggagccattgcttgggatgatcctgatttggggattgattggaaaataccagtggataagattcttttgagtgaaaaggataagatacatcctaggttgatagagattgtctgaaggttatttaattggtatttatacttctgcatgtctaaagaactttatacagccaataataagcgcattgccaaaaatactctctacttgtatcttcgtatgttacttacaatgggagtttcactttatacttcgcgtatcgtactgaatgcgctggggatagtggactttggaatttataatattgtgggtggagtggtaatattattttcgtttatcaataattcgctctcctctgctacccagcgtttcttgaactttgaacttggtaagggggatgccttagaaacaaaacgcattttctcaatgtctcttactattcacatttgtgtagctttgtttgttgtcttgttggctgaaaccgttggcttgtggttcttgaatacgcaaatgaatattccgttcgaaagattggctgccgcaaattgggtttatcagttttctgtgttgactgtctgcatgaattttgtacaagttccctactatgcaagtgtagtggcatacgaaaagatgtctttttttgcatatatagcaattatagaagttatgctaaagttgctgattgtgtttatgttgatttatgtaggttttgataaacttgaattgtactctatacttacttttgggattgcggttgtggtgtttatctgttataaatattattgcaatacccaaatagacataagccgatataaatatttttgggacaagtcattgttctacagtcttttgagctttagcggatggatgctttttggagctgctgcaggtgtaagtgcaacgcagggcgtgaatgttttactgaatgttttttatggtgtggcagttaatgccgctatgggaataagtaatcaggtgaattctgctgtaaatcaatttgtctctaattttcaaacagcgtttatgcctcagataacaaaactatatgcaataggagactttgaacacttgcgaaaattaataggccagtcatcccgcttttctttcttactactgtttgctttggcgtgtccgcttatgttgaatattgattttgtcttaaaattgtggttaaagacagtgccggaatattcatctgtattttgtattctaattctgacattttcgttgatagaagtggtatccaagccggttggactggctattcatgctactggaaaagtgaaatactataatattgtcatgagcatcgccttattgatgaatattatattttcgttcatatttctttcattaggtttcttgcccgctgtagtgttggtgataaacgtatgtgtcggtattttatgctttgccatacgtttgttgtttgcaagacactacaaagtattgataatacatgagtacattcgtaatgttatttttagaacgatctgtatttcagcacttgttgtaccaatacctctgtacctcagcagatgctatactcaatgggttggtttgttcatcaccacttcgatatttttgtgcctgtttacaattgcggtatattttgtaggtttgacgcactcagaaaaagaaagtacactgaaagctatcagagcaaaaatatccaaataaaatagaacttcatgactgaagtaaaatacttgaatattattgaaaaaaaacgttgttcaggctgtactgcctgtgtggcggtgtgtccaaaacaatgcatcacaatgcaggcagatgaggagggcttcttatatcccgtagtaaatactacgaggtgtattcagtgttcgaaatgtgtaaaagtgtgtccttatacagattcggaatttaccaataaacctgaaaaagaagaactgtccgtctgctatgcggcatacaacaaaaatgaggagatccgttataagtcggcttcgggaggaatgttccgtgtttttgccgaccaaattatagcagagggtggtgtggtttttggtgcaacattcgataaggattttacagttgagcatacctataccgaaactctggaaggcttgaccgctttcatgggaagtaagtatctgcaaagcagaatggaggattcctttattcaggtaaaacgatttttgagagaaggtagaaaggtgctgtttacaggttgtgcttgtcaaattgccggtttgaaaagatatttgaagaaagatgatgctaatttgatttgtatagatttgatatgtcatggagtggacagtcctcaaatatggcttgattatctgcatagcttgtttcccgatgaatcagtgaagtctgttaattttagggataaggtaacaggacaagataattcttctgtttgtataattagcagtaaatcaatgttttgtgaaagggagagaaacagtgtatacttcaaaaattggcaatatggcatgtttacgaggccttcatgtgagatttgtccgttcaaaagcgataatcgtgtaagcgatataactataggcgattgttggggatttaaaaaaatagcccctgaaatgtatgatgacaagggattgtcaagcatggttgtacattcagagaaaggaaaaactttgtttgatacggttatgcatcaactttcatttaaagaaactttgattgacgatgtgaaattgtataactctgattatatcagaagtaatgcatttgttcatagcaggaggaaagctttttggaaggattatcatcaacataaaaagccctttgagaaattactgaaaaagcatcttgaagatagtaagacgaaaatcctatttaaatatataaaaaaagttgtgagaagatgtttgctgttattaaaaggattgcccaattgattcttaatctggggacaataagaatgagtcagataaaaaacattattgcaatagataaacgctttaatgagactttccgctttgatggtaaagaaatgcctgcgacttttagaaggcagcccgaatgggtatttgtagtgacttatcgcaaatttcaagaaaacaggaataatatcgtcggagcatattatcgccgtaaactggccgctattgagcgcaagacaggtattcatatagaaaataatcccaattttggaaaagggcttattatcgggcattacggacgaattatcataaacggaagtgtaaagttcggtgaccagatttatattacgcatggtgtcacgattggcaggaatgccgttggaaaaaggaagggtacacctgtgataggaaatagagttcgtattggtgcaaatgcaacaatagtgggcaatgtccacataggaaatgatgtaatgatagcgcccaacgcatttgtcaatattgatgtccccgaccattcggtagtggtgggaaatccgtgcatgattcaccataaggacaatgcaacgaaaggatatttgggcgaaattgattaaacatatgataaataagattttaaaggcattgtttttgaaagataaattctctgtcgaatggagaaaacgtaatgctcataattttacaacaccggtcatacatttcaatatggatgctgttagggttggtaagggtacttatggcaatttatatgtcgtgacccgtgattatcaggatgtgcggttagctataggcgattactgttcaatagcaggaggggttaaatttcttctgtctggaaatcatcagtatgatataatatctacttatccatatgaactgttggttttaaaaaacaaagggacgggcattgctgtcgcgaaaggggatattgtagttggcgatgatgtgtggtttggagaaaatgctattatttgttccggtgtaaccgtagggcagggtgcgatagtggcggcaggtgcaattgtaacaaaggatgtagagccttatgctattgttggtggaaatcctgccaaattgttgaagtatagattctgtgagaatattcggaggaggttagtcgaaatgaatgtgggggatatttttgaacaagcgagaataaataataattttcaatctctacataccgtcttgactgaaagtaatgtagatgaaataattaaagaatatgataagtagaataaaactatatttatcaagagccgttcggtttgtcattagtggtgaacctaaagtttttgtaagagtggatagtgtgcagcaaggcaaattattgtttggtaaaaatatcattattacaggtgcaagtagtggaattggttatgagatagcgaaaaaatgtttgcttgaaggtggaaatgttctgtgtgtagctcgcaatgaagaaaagttaatggcagctatagaaaagctgaaaaatgaaacggggaatgatgatgtgcattacttacagtgggatattgcggatatttccgtctgcgaaaacaaatgcagaaaggcgatagatttattgggcggtcacattgattgtctggtcaattcagccggtatgacctcaaaggtaaacatcgcagattgtacgccggaacaatgggataatatatttaatgtcaatctgaaagggttattttttataacatctgaatttgttaagcaatttgttaggcaagaatcaggtggaaatatagtaaatattgcctctcaagcgggtttgaatgctcagactcgcccttatgcgctaacaaaagctgcattaatacatcttacgacaggtttggcaaaagaatatgtttcatacaatattagggttaatgcgatagcaccgggacccacagtttcggatatgtttagtgtagatcctaatggcgatttgcatagcggtaaccgctgtaaacgagcatttcgttcagaggaagtagctgaaacggctctgttcttattgagtaatgcttccaattgtattacaggagaagtgattgcttgtaatggaggtaattctattcgtacagatgctttttgttgagataataatttccaaaaattaaatttaagttacgatttctatgaaaatatatttccctatacatcttgatggtggaaaccgtggttgtgaggctatagctaagggcactgctatacttctggataagcctaaagaaaaattagtggggctgtgcagagatatagaacttgacaaacgtttgaaagtagatgagtttgtctgtttatggaagtgctcttggtggctaaatcttttaaatcgcttttatctaaagttcatgtctttcattataagcgacaaaaccgattttaaccaagtagtttggaaatgtcattatggcatgttcttgaataaaatgaaagtcggtgatgtgcttatctctactggaggggatatgatgtgttatgataataatgaggttgtatatactaatgataagatacatgaaaaaggtttgaaatcagtgttgtggggctgctctattgggaaaagcaatctgacacctgaaaaaatcgctactctgaaacgtttttctcttatatatgctcgtgaatctcttacggcttctatgttgcagcaggagttaaagttgaaaaatgtagtagtatttccggatccggcttttgttcttgaacctgaggaggtggatttgcctgattgttttagtaatgggactgtgataggcctgaacattagtaattatgttttggacggttttaatttcaaatcacaattgggaaaagatattgtttcgttcgttgagtctgttgtatattcttcagaaaaacatattttgttgattcctcatgttatgtggcttgggcaagatgaccgcattgtctgccggatgctttatgacaagtataagcacacagggcgtgtgcatttgcttgatagtgcttctttgaattattgccagattaggtatgtgatttctaaatgtttcatttttattggagcaaggacacatgccgttatatccgcttattccacttgtgtaccatctgtggctttggggtatagtattaagtcgaaaggtatagctgaagatttaactatgccggtagataccgttgtcgattcaaaaaactaccaatcaggagctttcatgaaagcctatgactttaccgaaatgcatgtagacgaacttagaaaaagcttggagacgattatcccggaatataaggaaaacacttatggaataagaaaagtgtttagtgagttgtcttgcaaataacaatattgaaaaagattttttggcgatgaataaaaaagttagagtgattgctttttatcttcctcagtatcatccaactcttgacaatgatacatggtggggcaagggtttcacagaatggactaatgtaggaaaagcaaaaccccttttcagaggacattatcagcctaaagttcccgcagatttaggatattatgatttaagattgcctgaagttcgcgaagctcaagctcaattggcgcaggaagccggtataggaggtttttgctattatcattattggtttggtaatggtaagcaagaattggaacttccctttaacgaggtgcttcgttttggaaagcccaatttctctttttgtttgtgttgggctaatgaagcatggcactccaaattttggaataaggatggttccattcaaaagaagtgtctcatagaacagaaatatgatactgaggaagggcatataaaacatttcaagactctgcttcccgcttttaaagacaatcgttacatctgtgttgacggaaaacctctttttatgatttataaaccatttgaatttgaaggcgtaagtgaatttattgctttatggaatttgttggcaaaagagaatggattgaaaggcatacatttcgttgcacatctatttcaaaatattaatcaggtcacagtagataaattacatctaatgggatttgattcggtgaatacaatgggattgcatatcggatttggcgcaaaaagatcattgataaatcgtctttggggtaggattgaaatggcaatcaatggcataccacgagcaaaggaatataagaatacctatccatatttcctttcggatattgataaaaacgaagatgtgtatcccacgcttattcccaattgggatcatactccacggagtggtgctgcaggtactgtacttctgaattcaactcccgaactgtttaagaaacatattcgggaggtaatgaatgtgataagccaaaaagaaaataaggttgtatttctgaaatcatggaatgaatggggagagggtaactatatggaacctgatttgaaatatggtcatggttacatagatgcattgagagaagaattgaatgctcaaaatctcagataatttataatataaatgaagaagataatgttggtcttcggtactcgtcccgaagctataaaaatggctcctctggtgaaggcgcttcaaaaaaaatcccgtgaatttcagactattgtttgtgtgaccggtcaacaccgtgaaatgcttgaccaagtattgcaaatattcgacatccagccggattatgatttgaatatcatgaagcagggacaggacctttatgatgtaacagcacgtgtgctcatcggtatgcgtgatgtgttgaaggaggtacagccagatgtggtactggtgcacggcgataccacaacctctactgcgtctgccttagcggccttctatcaacagataccagtggggcatgtggaagcgggtttgcgcacccacaatatttatagtccgtggcctgaggagatgaaccggcttatcaccgggcgtattgctacttatcatttttctcctacggcgttgagccgtcaaaatcttttggctgaaggggtgaaagaggaagcagttacagtgacaggtaatactgtgattgatgctctctatatggtagtggacaaaatcaaaagtgacaaaacattggatgcagagttggaggaaacattgaatcaggcaggttatgatgtgaatcgtctggcaaatgggaagaaattggtgttggtcacaggtcatcgtcgcgagaatttcggtgatggatttatttctatgtgtaaggccataaagacactgacagaaaaatatccggatgtggattttgtatatcccatgcatctcaatcctaatgtgcgcaaacctattcatgaggtgtttggtgaagatttgtctaatctcggaaatatgttttttatagagcctttggagtacctgagctttgtctatctcatggagaaatcaacgattgtgttgaccgatagcggtggtattcaggaagaagctccgggactgggaaaacctgtgcttgtgatgcgcgatacaacggaacgcccggaggcactggaagccggtacggtgaaactggtgagtactgattatgataaaataatagcggaggtatctgcgctgcttgacgataacgattattatgagaggatgagccaggctgttaatccttatggagatggttgtgcctgtggtagaattattggaaagttaagataatgacaccttatatatttactatttccatagtatttatatcattcttatattcatataaaagggctgataagcgaattttcgggtttgttatattgttagtctgttccattatatgttttggatatatgactggcagtgattggcgtgcatatgaagaaatatatgattcatacaaagaacctgataacttttattggagatttctatttgttgagcctttatatttatgtcttaatattataggaaatgaactgcatctgaacttttggattttttacatagtaattaaagtcttaatattttgcaaaattattagtatctttaagaggttcagcccctctaatgttcgtcttttagcattaacgttctatttaggcttttggggagtgctgatttttatggatcctccattcagaaatctgatagctgtatatatattcttatgttcgattcgctatttttatgaacgaaaatttataaaatatctgttgttttgtttgatagcggctctttttcattattcatcgtttctgttgatacctctatatttttgtaatcgttctttttctaatagaaatattatagttgcttttgtaatagcaaatttgttgcttcttaatgcggattgggtgttttctctaatcggaaaattattattttttctcccacaaattcccgctaaaattgaaaactacacagttggagatgaagcagatacaaccggtgctggaaaaataatatccttaggatattttattcatgtcttttttttcatcataattcttatgtcccggaaagaaatcgagaaaaatccatatggaaatctaatttttaatatgggagttctctatatttttattttcagattgggattaacggtgttaatattctccagagtacaattattcatatctattttttattcgatagctgttgctttgtcgctaatgtcaatgaaatccaatcaaaagcttttctatgtatttattatatatgcgttagctgttttttcgaatgtaaatcaaatgagaagtgtgtatatggttccttatacgaactattttttttacttggacgaaaatttgtcttttgaagaacggtctaattataactttattcattctccgtataaagaaattgataaatgaaacagattttatatttgatgcacattccttggggatggataaaacaacgaccacatttctttgcagagaaattggctaaagatatcattgtggatgttaagtataaacaaccttttaaggtagctaagaaacatctactaacctccaaaagtgagacaataagtaatttgtttataggaagtttcctcatgtttccattttacaaactacctatactaagatattttacttgggggtggattcagtctttgtcattgaaactttctttaaagaagaaaggtacgtatgactttatctggcttaccagtcctgctctttatccgtctataggttgcgtgaacagtgatgctaagattatttatgattgtatggatgatattgccgaatttccttcttctaaatcatctccagtttattgtaagcaactcataaactgggaaatggatttaatgaaacaagcggatatagtattgtgttcatcagagtatttgaaagaaaaagtcatctcgcgttctggaatcaacagggaggttcatattattaataatgcaatttctttacctcaaatcagacattttgatagttttccttctaaagtgcaagatgcaataaacttgttaaagtcgcttaagtgttctcttctatatattggaacaatatcccaatggtttgactttaaacttatttgtgaagctttagataagaaggaggatgtacaattggttcttattggtcctaaggattgtgatattccttctcataaacagattcattatataggttccgttgaacgacagtatatctattcgcttatggaacaggcttctgctttggttatgccttttatcgtaaatgagttaattcggtctgtaaacccggtaaagatgtatgaatacatttatatggaaaagcctatcattgctcctcattacggtgagatggagaaatttcttccctatataaatttgtaccatgacaatgatgagtttatgagtttagtggatcaactctctaaaagcgaactgcagattagttccgaaaagggaaatgaaatgaaaggctttgcggagaagaatacatgggaaagccgttatgaagaagtaaaaaagatattgtttaacgtttaatttaacttgttatgtctgttactatatctgcaaacgttttagttcgtaatgaaatcaagcacgtggatgcgttcgtacgcaacatgatagacgcttgtattgatgaggttatttttttggatggcggaagttctgatggaacttatgaacgtctattggagtacaaagtgaaatatccatatttacgagtacttcattgggaacaacccgaaggaagtgaatataaacaaggctttaatgaagttgctcgtcgcaatctaatgattgaagcgtcttccatggattggtgtctttatattgatatagatgaacgtgtgccgattgattttaaaagcagattggaagagaaaacaatgtcgtctgttttgctggtagctttccctcgttatcacttttggcagaatggtattagagtcaatatgtctgatgataaagtttggtatccagatttgaattatcgattgtttcgtcgagatcaacggttgaggtttggtagccatgatgccaacggattgcataattatctcttgtataagggaaagcgggtgatggggggatttaataaggctaaggttatatatactgctatccagctaaggaacaggtgtttactatccttgtgggggggtaaaaatattaaacaataataacatgtgtgtgtttcatttgcattactacgatttgagtactcctaagataaacgaccttaggagacgtgagtttgataatgaaataaagattgtatcatcagaaaatggaggtttgtcttatcaattacaagataagattgttccatgtatacctgtatcaaacgtgtatggagcacagataattatagaacggtatataaaatgaaatttggtatgtatgggcgtacccaaggaatataatacaacaacagacagcgtgaagaatacttgaaaattgtagacgattatttatatgatatcagtttgtatagcgactcacaacggtgagaagtatattaaaaaacaactcgagagcattctttcacaacttagcttttcggacgaaattgtaatttcggatgatggctcaacagatcaaacgatcaaattgattcagtctttcgaagataagcgcataaaagttcttacctataaacagcattttgattattcaaagttctatttgtcctcctactattatgcaactgccaatttctataatgcgttgaaatatgcgcaaggagaaattatttttttggcagatcaagatgatatttgggtggaaaacagggtttcagtttttatggaagcgttgaaaagggccgattttgttacatctaatttttctatcataaacgaagtagatgaacttatagatgaatcatattataatgagaatccgtataataatctaaattttataaaaatattgaagaaccttccttttagaggatgttgttctgcttttaaacgagatgtattgcaagcggctttaccttttccagagaaactttttttacatgattgttggattggattgaacgcttgttttaataatttcaagattgaatttatagaaactcctttgctcctttataggagacactccaataatgtgagtgatttgaactcacccaataatttgttatttaaaatttcatatcgtttgaaattagtgtggtatgtcttggttaatagactgataaaacgatgaagaaactattatttatatcttctcgtccaatttttccgataattggtggagatcaaatacgaactttccaaagtttacgactgctaacgaagtattttaatattcatctgattataataactcctacagatatttctaaagaaagaatggcggaatacgagaagtatggtacttgtagatattttaaaatgtcaaagagagaacattttgtgtctgcaatgagattcttgtacaatgctcttccagtacaggtgaattattactattctaaaaaagtgcagaattatatagaatcaattgtagataattatgatatagtatattgcaataatttgagaacagcagaatacttcaggaggcatacgtctgtgaaccgtgtaatagactttgtagatgccatctctatgaattatgaaaaggctcgtaagcatgctaatttattgatgaaggttgtctataatatagattatcatcgctgtaaagcttatgaatcacttttattacaagaatttgattgtgcttctgttatatcggatgttgacaaacgctatatattgcgcaattcaaagatggaaaaaggaattcaggttattggtaatatggtggatgtatctgaatacgtgcaagaaatagaagggcataatctggcttttattggtaaaatgagttatgcacctaatatattggctgtaagtaattttgtgaagaatgtgcttcccttggtcagaaacaaaattcctgatgttactttctacattgtgggagcttctccctgtaaagaggtgcttaaacttcatgatggcaaaagtgtaatagtaacaggttttgttgaggatataagtgaatattttaatttagcatctattatcgttgctccgatgttgtccggtgcaggcatacagaataagataatacaggctatgggacgtggaaaatgtgttgtgacaactcccattggggctgaggggcttatcataaaagatgaaatagccatagaaaagaatgataatgatatggctgagaaaattatttttttattaaatcgtaaagatgtgcgatgtgctatggggcggaacgcaagaaaatatgtgcaacagcacctttcattagatgcaatatctcaacaattctatgagttaatttcccctttattataacgatattcgtttttacctaattatattgttctcagagtgtaagactataatctcggtgacaaaaagcgagaatgctgcatgagtagtttactttacaatattttttttatgaatataataaggacttttatagatggaattatgcttattgaaccacaaatacatagtgattctcgtggctatttttttgaatccttcaatcaaaaagaatttgaagagaaagtttgtaaaactacgtttgtgcaagataatgaaagtaaatcttctttcggtgtactacgtggtttgcatttccagaagccaccatttgctcaaagtaaattagtgcgtgttgtgaaaggggctgtattggatgtagcagtagatatcagaaccggttctccaactttcggtcagcatgtttccatagaacttacagaggataatcaccgtcaatttttcattcctcgtggttttgctcatggctttagcgttttgagtgaagaagttatttttcagtataaatgtgataatctttatgctcctcaatatgaaggtgctattgcttgggatgatccggatttaggcattgactggcatattcctaaagataaaatgctactaagtgaaaaagacaaaacacaccctaggttaaaagaggcggaatggttatttgattattcagatatgctttattgtgttcctgaataattgatgatcatgagaatatagaaatgcgaatataatttattagggaataataatggatataaattataagattattgatacccagcgagtcattgattatattatttcttttcctaaaggtgtttccgtagaggagatcattcaaaattccggtgctgaaaagttacgggtatatcccgctctttttgaattggaacagagtggattcttggaagtactggagagggaagagcttggagcgccattaatcgtacgtaagagaatacattaaaagaaacgacaggtaacagcggttattttgttttaggcagcagccgggattactccgtaataaggagtggttccggttgttttatttagttgtgacataaaataaatataaaacggatgcttgcaattaaaggaagcatagaatacattagtagctgtatgtatttgttgccgatggctatcggtacttttaataatatggcaataaatcttgctcgttccatttttttttcgtcctttgctaaaaatgtagatgtaagccgaatggagaaagtttgtataaaagggtataaatcctttcaagacataacacttgaattggggcaaattaatatacttattggttctaatggttccggtaagagtaatttcttgtcgttttttgagttcttgaataaaatatacgaacagaagatgactgaatatgtagcgttgaacggtggggtggacaagttctttcataaagggagcaaagtaacagatgttattcaggcagaagtgttttggaaaactaaccgttatcaaattcagttgaaagaaggagacggcagatttgtggtggctcatgaaaaattgggctatgctgctggaagtatgatatattataatgatatagccaactataccaatgaagcaggcatcaaacaatacaaagggttgaagcgtggagactatatcaataactatctgacagaaataaagaaatatcatttccatgataccggcaaaacctctccgtttacaaaagaaagccacatacagaatgatcgttattatctgtatgaaaaaggagataatttggcagctttcctttatgccattcacgaggaaactccaattgtgtacaatcgtatcgtgaaagtgattcaaagtatcgctccctgtttttccgatttttattttcatccgacagccgccaatacgttgcgtctgcaatggagagataagtatagttcaatggtgtatggacccactgacttttcggatggtaccattcgctttatagctctggcaacactgtttttgcaacctactcctcccaaagttatcattatagatgaacccgagttgggattgcatcccgtggcgatacaaaaattggcaggtatgatgcatgtcgcagcttcaaaaggtacacaaattattgtggctacacaaagcaccgacttgctctgtcattttgaacctgaagaagtgattacagttaatcaggttgaaggagctactcagatggttcgcctaaatagtgaagacctgaatcattggttgggagattatactttgggcgatttatggaagcagaatatcgtgaaaggagggcaacctgaatgaacagactcatttatgtgaaggtgagacggaacaggaattttgcaaggatatgctggcgtcctattttcgagaaaagaatatctatatagaatatttcacaaatagagaatgtctatgataaaatgaagtgcttgtccaatgaactgcaatttggtgagttggaagaggcagtaaaatcggctgatacgtccgaagaaataaataatggtccggctactgctccctctgtacgtttgatgaaggcgattgcgggttacaacaaagtggtatatggggcttgccttgttttggagattggcttagcttctattcgtagcaaatgtaagctgtttgatgaatggattaccctgtgcttgttgtgactaaatatcttatccatagtgttttatgataaactctgaaataaccgtcctggttatccagttttctttggctattcctgaatatatcctcacctttgcatcgttggccaacacaagaatacgtaaaacgaagttgaactaaaatgtaaaaggaggaagattatgcctttattgtattatgcgagacaatcgcagttgaaaacgaaagatggggttaaacagtggcacctgacattgaaaaaagtaggaagagctgtaagtttacaacagttgggagagatggtagctgagaagtgctcggcaacaccgggtgatgtacacaacgtaatcaggaacttgatgtcggtgatgcggatgcagctgctgaatagccgtacggttcgtttggatggtttggggacatttacggtgatcgcgcggacacggggcaagggggtagataacgagaaggatgtaaatccgaatcaggtaacatccctgcacttcatgtttactcctgaatatacacgtccggcggcattgggaaccacgcgtgcattgtggcaaggtgtggagtttgaaaagtggacgggtggaactgctactgatggaaatgaaggttccgatgatggtaacggaggaaatgccggtggtggcggaggcctcgatgagaatccacttgggtgagtggagagttgagaattgagagttagggctgcgcagtccatttattattaaagcacaaagtaattaacatgaaaaaagcggtttggaataagattctgaaaattgtaatagcagtggcttcggctatattaggagctttgggagctaatgcgatgaatatgcgataaaaatatcgtgattataaaaatgaacggtgggaatatggtttgatggactatctctcaccgttttttttatattaggatgatatatacacttgctatttcgtcaaaattaacactaaaacgtaaaaaacagcttgaattatactctctttttttgatttaaaatgttgatagatagtttgttttgcaaattgtaaatcaaaatactgaattcgaaatgtatattgccttttttccccctatttttgaagagcagataactgctattattaattaatacctttttgttatgttattatggaaactcaaaaagaaagcattatggcagatgtcaagaaattagcaccattcatcttgaagtgggagggtggtttcgtaaatgatcccgatgatttgggaggagcaactaacatgggtgttactatggcaacttacaaggtatattgcaaacggaaaggacgccccgaacctgcaatagacgatttgaaacatctatcgaatgatgagtggatcgatatcctgaagagcctgtattgggataagtggaaagccgatcagataaaaagccaatctgttgccaatattttggtagactgggtatgggcttcgggaaactacggtatcaagataccacaagaactgcttggagttacagccgacggcattgtgggaaaaaatacccttgccgctgtcaataactatccttcacagcacgaactcttcgacaagataagacaggcacgcttggattacattgaccgtatctgcaaaagccgcccggtgaatgagaaatacagacgtggttggtgtaaccgtatcaataacctctatttcgaagaataatgataaggcgaattcttacatattatgcagcctctctggacgagtacttgcaccacaagttcccgcagcccgaaggtatggcagaagtgggattcattggtagtagtgtgggcgaaaagccttgcaaactgattgtttcacttgtcaacattgagcgcgaaacggcaggaggtatctcggcaggcatcaatcgtaacagttcggactatatgcggacgtttgcgccgttattgctgaaccttgacttgatgcttgctgctgtatatgacgagaaacgatacgccgagtcgctttccgtactgtacgaattgttgctttttatccagtcgcatccctattttgaactggacgggcagaaatatacggtagagatcgtcacactttcggcacaggacattaataatatctggaccatgctgggcggacaatattatccgtcggtgatgtgcaagctgcgcaggcttgcggtggatgcggaggaagccgtcagcagtggtggtattgcccgtgaaccatcggtcagcgtaacaaaatagaaaggagaaaatacaaatgagccaatatatagccatagctgccatacgtattgaacacaattattacaatccgcctgaaaacagctttgtgggattggaaccgacacccgacaccaagaagttgatgagacagcggggagtgatgttgagacaaagccgtggtaatgagtggcaatggatcatggccgatgatgcatcgggatttgcggataaggatgtactggagttatctatgattgtgaaggatccttgttttctgcaacagatagagagcgacggatatgatcccgacagcttttacaaattcaatgtggaaaacggattggtggaagtgaatgacgactttgtatggagaaaggaaacgaacgggcagaagctgaaaaatgagttttgccggattgtcttgaaaccggtagaaacggcatcggagaggttgcgaatgctctatatgaaagtagagcaattgggaaaagaagagatacgggaagaaaacaatgtacaattcgcagccataaaacaagaaataaggcagttacaggaaatctgttgtccgaaatttactatccgattttgttcctgtgcgtattattgggagtatctgtgtgtattcaaggatgagaatgatatgcggggaaaagatctcagactgcgaactcgcgaaaacgtagtggctttcggggcaccggaaaagtgtgagagaacaagtctgggaaccaatgtctggagacttgtttctatggggcggatcaaagcgaaggaacggtacgatatgccgatgcaactttacattggcaggaggttggaaagccggtttatctcaccgccgcaaatagggaaattccagtcggattcttcgcataccctaagagaggtatgctatattaaagaacaataattataaattttaaaactgataattatgggaagcatgaaaactcccggcgtttatatcatagagaagaacgcctttccgaactcggtggtggaagcgccaaccgctattccggcttttatcggctataccaagcaggccgtgaacgggaataatgacctgaagaatgtgccgtggaaaatttcgtcgatgacggagtatatacagtatttcggtggaggacctgacttgaagtttgaggtagatataaaggatggatcactctgcatagaagaaaagaacagttatacattatactacaacatgatgctgttctttgccaatggtggcagtacctgctacattgtttcagttggcagttatgaggatgctttgaacaaaaatgctatgctcgctggattggaaaagctaacccttgagcaggagattacgctggtggtcatacctgaagctgtaaatctgaagagtaatgaagagtttaaggatatacagcaacagatgctttctcattgtggtaacaaaatgaaaaatcgttttgcgctgcttgatatttatccgaaggcggatgaaaatacaaaaatagaagaccgagtaactatcttttgtactaatataggttccaattttttgtcttatggcgcagcctatttcccttggttgaatacttcggtagtgggagaacgggacttgacgggcgatgtgtttgtatggactgataatgtatacacttgcaggacacagataaatgatgattttgccaagatagtggaatctctttttaaagagacagaggagcttgaaatagaaagtagtgtagtaaagaacaatcatactttcaaacttgaagaacttgctgaggggaatatttatgctgacaatgacacgaaaaaaacaaaagcaataggtcggatagaaagtataaaagacattaaggatactgagggtaaaaaagtcataggaaaaagtgtgaaggtaatatggctatttcctaataatgtaaataaacaggcgttccatcaagcgttgtacaacggttcatccgtttataagcaggctataaaaggtgtgctgaaaaaattgaacctacttcccccgtctgccgctatggcaggaatttacactatggtagataatagtcgcggtgtatggaaagcccctgccaacgtaacgttgagctatgtggacagtctggtagaagacatcgatgacgatcaacaggccgatttgaatgcccctgctcatggaaaggctgtcaatgtgatacgcctgtttcgtggcgagggtataaaggtgtggggagcacgtacactggatggaaactccttggattggaggtatgtgaatgtacgccgcaccctgctattcctggaagaatcgataaagaatgctgcccgcacttatgtgtttgaaccgaatgatgccggtacatggattaacatgaagtgcatgattgagaatttcctgcgtagtgtgtggaaacgcggcggactggcgggcgcgactcctgaagatgccttcgaggtgcatataggcttgggcgataccatgactgctgaagatatattgaacggtatcatgcgtattacagttcttgtggctgttacccatcctgccgaattcattgagattacgttccagcagcaggcacaaaagagttgataactgattgttgaactttaaattataagaatcatgggagaatataagacccccggtgtttacatcaaagaaaagaatgccttcggtaattccatagtggaagttgaaaccgctattccggtctttatcggccttaccgggacagcccaggatggaacctcgtccctgctgaacaagccggtgcggatttcatcaatgacggagtacaacacgtatttcggaggggcacccatacctcagttcatgctttcttctgaagagattaaggatgttgacgaggacaaatatttgttttgttttcctgataatgaaaagaaaatggctttgaaatgcaaagcaccggaacatatttataccttgtattatcacatggtgctgtttttcgccaatggcggcggaacgtgctatgtagtttcattgggtggatataacgctgatttttatgagttgtattcggctaataaggacactgtgtttgccaatatcaaaaaagaacaggacatcacaatggtggtagtgccggaagcggtaaactcagccaactgtatgaatgtttatactgatttgttaaaggaattggccgataagcaaaaatattttgctttgctggatgtgccaatgggagcaggcactaagacagaggaaatttcagattcgtttggagcaggcataggcactacaaacctgcaatatgcagcggcctattatccctggctggaaacttcggtattatctgacattgacattgatgaaaggatgctggtctggagctataatgtagataccacttcaatgatttttagtggcgattcgaaggtagacgagtatatcaaaaagtgttttactatgataagcacagagaaagatgctaccggtaaggtattgaaagcgggcgatattcaacaagttaagacagatcttcataatgccctgttgcagaattggccgcaatacaaattgctggcgaagaaagtgaaagactatttgaacctgttgcctccctcggctgtaatggccggtgtctatacgatggtagataatacgcgcggtgtgtggaaagctcccgccaatgtatccgttagctacgtgaacaagcccgctgtccctattacggacaaagaccaggaagtattgaatatgccaatgagcggaaaggctatcaatgccatccgcactttccccggcgaaggtatcaaggtatggggtgcccgtacattggacggcaattcgcaagactggcgttacatcaacgttcgccgcacgatgatttttctggaacaatcggttaagaatgccgctcgtgcctatgtattcgaaccgaacgatgccaatacatggatcaacatgaagtgcatgattgagaatttcctgcgcagtgtgtggaaacgtggtggacttgcgggttcaacacctgaagaagcctacgaagtacatgtcggcctgggtgataccatgacgagtgatgacatactggaaggaactatgcgcatcacggtattggtagctgttactcgtccggcagagtttatcgaaatcactttccaacagcaggcgcagaagagctgagaataataaaaaaataaaagttaacaattaaaaattagaatattatggcagataatggatcagcacagagtcaggacactaagatgtggccgttaccgagttttcatttcaaagtgacattgggaagtgtgggtgaaatatctttcagtgaagtgtcgggtcttgaaaccgaattcgaggaaatcacctatcgcgccggtgacagcaatgatttcacaaagttgaagatgcccgggctgaagaaagtgagtgacataactttgaaaaaaggtatattcgtttctgattcccaactatggaaatggattggtaatgtgaacatgaatatcatccaacgcgaaaacgtaactatcagtttgctggatgagtcacattcagccgtaaaaacctggtcgttgacaaatgcctggccgaagaagattacggtggaaggcttcaaggccgatggtaactcagtagctatggaaacattgattctggcacacgaaggaatacagattagtgaatgatttttatagattatgattgagaaccttgcatggaaatttctgccaccctatgagttttactttcgggtgtgttttatggagagacttgtctcactgttttacgcctcgtttacggaagtcagcggtttaggttggaactatgaaaaacagacacagacgggagcggagaatactgcccaagaattgcctaaagcaatcaaatatggcaaaataactttgaaatcaccgcttgtgcctttggctgcaccgtttgaaatctgggtgaatgactgttgtaacagtttgaacatgaaaaatgccaaagatcagattattgccctggatatggtcattacactacaaagtcaggccaatgttccggttgcagcttggctgtgttcgcactgttatccgataggatgctcactcagtggattggatgccgcaagaagtggacttgcaatggaaactgtcactctgaattgtaatcggttagaacgtaaactgtagaaattatgcctgttgttataaaagaaatgcatatcaggacggttgtagaaaaacgaatcgtcacggaggtggaagtttcggaagagcttatccgaaagattgaaaatcgcgtaagggacaggttggatgcagaagatagcatccgacctggttcccggcagtggcagagaaagaaaaatgagcgttagtaatgcataaagaaaaagtgaaatgggacagatgaccatcacagcctatacggacgagaatttcagtagcgaatataaatctgcgctggaacttcccatcaatcccgataaggtgaagttcacgaaagggatccaatatgcggaggacaagcagttagggagcttgaacgggtcgaacgtatatgcacgttaccgtccggagaccctttactttgagtgcctgctcgatatgaccaatgccttggatgatgatcgtgagaagaaacccgtccacgatgtggtgaacgatctggaacaacgcctctattgctataatagtgaagggcatcgtccatcgttcgtcaaggtgcagtacggtgacattctttttttcgggcaactcaaggcgctcgaaacggaatatactttgttcgacttggatggtatacctctccgcgctgaattgaaagtgacactgacgggctattgcagccagaaggaagaaaataaaagattcccgaaacgttcgcccgatgtgtctcggatggtcacgctgaaggaagggcaaacactggcagccctatgtaatgaagtttatggtgacccgctccttgtgggcgaagttgcccgatttaataacctgaacggttacaggaacgtacccagcggtaccaagatcctgttgccgatgttaaaaaaataattaaaattatggctgaatcgccttctgtacacaaagaccgcgtactagcttgttccgtttattgtaacgggagcaaactgaaagatgagtacgctttggtttccgctatggtgcatcaggaactgaaccgcattggcaaagcaacattgaagtttaatgccggaaatatggacaagcagacttttgacgagagtgatgctgaccttttcaagccgggcaatactatccgtctggatgcaggcgatattgacaaggaagatacgctattcgatggtgtgattattgggttacgcatcatcaccgatagggattttcgttcctatatgttggtggagtgtcgtgattatgcctattccgcgacgcaaggacgtaagaatcgtatttttgagaagaagaaggactgtgacatcattaaggaagtattgtcggcttacggtagtgtggaagtagactccacaccctatcagcaccccacgctggtacagtattattgttccgattgggactttgccctttcgcgtgccgatgccaacggtctgttcatctttactgacggtagtaagattaaggtgaagaagcccgatgtgagtgcgtcgcctgtactgactgtaacttatggtgtcgacttgactgcttttgaccttgaactgtccgctgatgaccagtttacgcaatatgaagcgatgtcttgggatcccgctacacagaaagctgtgaaagtgtccgctagttccccctcgctcaataagcaaggggacttgcagccaaagaacattgccacaggcgatagctttttgttgcaaactgatgctcctacagacgagaaagcgttgaagcaatgggcggatggcatggcattgaaagctggattggcacgttatcaaggatcatgcagcttttacggttccgccaaggtagtgcccggctgcatcatcgaactgaaaggcttgggcaaacgattcaacggcaatctgtttgtcggctcagtgacgcatactatcgagaacaacgaatggatgaccgaagcgggtgcaggcgtttcatccctgaacattactgatgaaacggatgtggtatcgccttccgcttccggttttctgcccggtttgcagggacttcatgcggcagtggtaaggaaactggacggcgatccgctgaaagaataccgtattcagatagaattgccatggatggatggaaagaacaagttgctttgggcaaggctctccactatgtacgccacaaatgcgtcaggtaacttcttcctgcccgaaccggatgatgaagtggtggtgggctttatgaatgaagaccccgggcatcccatcatattgggtggggtgtatggtgaaaagcacaaaccgccttatgaatacgaggcaaagaataatacgaaagccatcgttacccgtgagaagatgcgaatagaattcaatgaggaaaagaaggtgataacgatttctactcctggaaaaaacacggtggaaatcagcgatgatgacaagcatatcaagttgaccgaccagaataagaacgaaattgtgatgaacagtagcggtatttccctctcgtcggcaaaagatatcacactgaaagcgaaaggcgccatcacaatagaggccacttcaaaaatcaacgccaccgccaagcaggatgtcagcctggaaggactgaacgtgaaaatggaggctaaagtgagtgcaactgttaaaggcaacgccaaggcggaactttcagcttcgggccaaactactgttaaaggtgcaatggtcatgataaactaatggacaattaggaaatggatttttaatttataacttttaatttgaaaattatgcctccagcagcaagaataactgatatgcacacctgccccatgcaaaccccggcgtttccctcgccgataccgcatgtgggcggaccgatagtcggtccaagtgtgcagaatgttttgatagggaaaataccagcagccgtcgtaggtgacatgtgcgtttgcgtgggaccgccggatacaataataaaaggttcatccactgtaatgataggtggcaaaccagcagctcgtatgggtgacagcaccgcacatggtggcacgatagtcgccggatgtccaacagtgatgataggaggatgaagagtatgagcgaaaagaataatatattggacaatgatggctttctgggaaaaggttggaactttccgcccacgctgacagaaaacggtgtaaagatggtgtcttatgaggaggatatccagcaaagcttgtatgttctgttgagtacgtcgcccagcgaacgggtgaaccgctatgactatggttgtccactccgtaagtatgcttttgaggtgatggatacggaaatggtaacgcagatgcggaatgacatcacaagggcggttatgctttttgaaccgcgtatcacgctggaggaagtttcttttgaaaaaagggaggaggaaggagtgttactgataaaactggtatataccgttgttaggacgaacaatcggagtaatatggtttatccgttctatttgaatgaagggacaaatttaagatagggctttcggagaaagaatcgtaataattttaaaaaataaaacgaatatgtacacgggcagacaatttaggaatgaggcgggaaacagggtttctcggcaggtggagtgtggggcacggcagttcgtgaggatgaaggatgagaggaagaatgaaacaacccccaaagagctattctctatacaaaaacaagcaaatttaaacaatataacacagaatgtgaagcctaaaaatttattccaacttatggctgtaaatccattgccaccaggcttaagtagtgatatagtaaaaccatgcaaagtttgggcaggacgaatgattcctcttactggaaatgtctattattcaaagattgtattgcctcaaagtaatattaaaactaatttattagcgaaaatagcttctattgcagcaacagcaggaaaaaatccaaatatctccaatgcgatgttaaataggaattggacaaatgctcaaaatcagatgggtataccggccaatccaatgattgacccttgtcggatacggttgagagcaggtaaaaaaaataatagaattgaagctgaatggcattttggtggatacaaccaaggatatgttatgatgattagagacaatagtgcttcagggaataaaagtgctcgtttaacacgaaatgatcataactatgcagttgcacatacaggaacaaattctagaagtggaatcgatttatacagtgaaagacatgcacaaaatccaggtagaatattattaaatagtgcaaatgatgtaactattattactactaataataatcgttcagaggcatgggatgctcatacgaaattattaggagaaggtgctagatggaattttgtaagaggaaatgtgacaagaattaaagaggatacatatattgggacttggggcaataacggtgttgttcaaaatccaggtattcagtttcgacatttatggtgctgttggggaagtgtatttaataaaaaattcggaatcagcaatgctgttgttagaaatgagttactgaatagaaatccttggattacatctaataatcaaaatgtaggattagtagcaaatacaaacctacaaaatgataatattatggtatagtatctaataggctttctatttcatcagatttgcaatccaacggctataaatataaggatttgcaatccgtaaaatcttaaacggcaggttgagtagatttaaaatattagttgaacgaaacagataaaaacgatatatggcaacggacaacagatatcgcggcatcctccgtaccgattacgaagccgcccaagcaaggctgaaaggctttgtgcccatgaccatcgatgaagcccagttgctgcaccacttggcagaggaggagcgattgctccccctttgggagaatcacgtgttgacagtacttgccgacatccatcgcaaaaagctgtcgggatacagcgggagttttgccgatgcacaaggtacagcagaggcaacgctctgtgcgaagaagctcaagcgggacatcaatggctggcaccgacggctggaggcttacattgacttgagctggaagtcgggatgcatcggcagtgttgccgttgaaactgctcgaaagctggcaaatcgcctgaaaggtgctttgcctaatggcaatgtggtgaagaaaaaagattattaccggatgctccgcaccgtgactgccattcaggataacatcggcatttacttacaacaggcagaagacagtggcgatatgaatccggcactgtccctgctcattgtctatctgaaaaactatggcagcattgctgaggttttcaaccgccgccttgccaccttgcctgaactctatcgtaaggacatcctgcatgccgtaccacaggatgcggtacaagacaacgtctatgtcattatcacacccacagaaggtatcggaggttttaccttgcctaaagatgagccattccccgccgggcaaaatgccacaggagaagaacttatttatcggactgaaaaaaaagaatatatcagccccgtgcagtgtgtggaagcggatgcactgtacggtttttccaatccttcttatggaggagctttggaactctataaacaaactatacaacttcaagatacaaccgatgctcaaacccttttcgtacatggtgaagaattacgcataggctggcaagtggagtcccctatgcttgtgttgaacgaaggagaacggaatatcagtatctatttccatcttacagccgatagttctatacccaacaatacaaaaggttttgtcctacaactgagcggagcggaaggctggatggagcaaactagcgagtgctatatcgaatccggtcggttatatttcagcttcagtttgccatacaatgcagttgctcctgcatcctgtatggaagaagtacatggcacaacaacagaatatcctgtcatccgtatcttgacagataatgcgaactgtccttacaagtgggcacaacaactcattttcgacagcgtggaaataaagacggaagtgaacggtattcgcaacttcagcttctataatgatcagggtgaagtagacactacgcagcccttccatcccttcggtatacaggcagagtgtggtgcctgttttctcttcggtaacgaagaaatgagtctgaaaaacttgcaggaagtccgtttgaaaggcatatggaaggaattgcccgaaacagaagaaggattcaacaagatgtataaggaatacggaacagatgcggacgtattcaaagtttccaccgaatatcagataggtggcaggtggaaaaaatgcggtgatgagcaaaagctatttagctttaatgaaaacggagatctgaattctgccgagatagtatttagctttacagtgcagccacaatccatttccagcgatgaaactgccgttccttacgaatacagtcgtgacaaagacggtttcttccgtatcaccttggagtccccttccatcggctttggcacaaaagcctaccgcaccttattttctgaaacgatggtacacaacagtggttgtaaggaaaagaaacgtaaagacttaccttccgaaccggttatccctgtgatggcggatgtagaactttcctatatcgctacggaagagacgactttaagtgatatggaacgttcgttcattcgattaagtcgtattacggcactatcccggcaggaaccatttcccattactaaaggagagaagcaaccgtttctgccttctgtcccggctgaaaatctgttgtatttcggtttacctcatgcactaggagagcagaacctgcggttgttcttcgatatggtattgcctcaggaaaagatcccattctatgacccgcaaccgggtaggcaggtaactttggcatgggaatattggagcggaaacgaatggcatcccattaccatagaatccgtccttgccgaagaaacgttaggactgacgcaaagcggatttatagaaatcaagctgccggagaaaataggcagtagccatatggataaacaaggtagggcatggatacgtgccgccgtgacaggcgatttgtcttcctgccttgctgtacgaggtatccggacaaactgtattcgtctcatttcccaaaatggagatggtactccgttgcctgccggaacgatacaaggtataaaggaaccggatgaacggattgaaagtgtcacccagcccttgagtggcttcggaggcaagcctgccgaaacagcaactggggtggctgtgcgacaaacttcacgcatcagtaaccgtcaccgtgccctcatgataaaggactacgagcatcttgtactggaattttttcccgaagtggataagatacagtgcattcccattccgcagaataaaggagcatcgaaaatatgcctggtggtattcagccgtgcggaagacagccgttatttcctctctccggcatggaaactggcggaaatacagcagcttgtccggcaatatgcatctccgtttgcttctttgcgtgtaattaatcccgtttacgaacgtgtgaatgttcactgcaaagcaatcctgtgggacagcgtgccggataaaggcaaggcagtccggcaacttgttgttttggcacagaactatatcgcaccgtggtatcggaaagaagaaattccaatgcttaggcaacgttactcctacaaggagcttcatgcccgaatggtgaatcatgaggatctgatgcggctggtcacgttggaagtgaacggtaagagtttgtcgcgtatagatgtcgataccgtggacttcactttcgaaggcaagcacccttggagtgtattgcttccggtaataaaaatagaacttctttctccccacgacggcatagagaaagccgaaatcgggagtaacttcataataggatagtggtttatggaaaagaataataacaggcggaaccgaagtgtgctgaaaagctattttcagaaaggtgatgtacccacagaacaacagtttgctgaactgatagattccgtgtcgaacattgtggaggatgggcaggtgatgagaactcccagtggatgggcgtttttccctggacaagccggtcacttggatatcgggctttacacggaagaacctctcacagaagtggatatacccacatggactctcgctatcacacccgaaaagaagctgactgtaaggaatgcgaagggagaagcggtgatggaagcgttgcaagacaaatcgatagtattgtatggtagtctgaaggtggaagacgaaattaccgcaacggcttaccagacggcaggcggagggggaatcacacccagcggtgaaggctatctgactgtccctgccgacaaacagtggcatgatttgccaatcgatgtgtcgtgcgaaggtttcggttgccgtgtatactctgtatatgcctcttttcgtgaacagggtacggggctttgccaactgacacgtgctaccgcgctttggcttaactttatgcaacagcgaattgaatcaccccagaagcactggtggggatggacgggcagcgtccgcttccgttggcagatgcgggaaaagaatatatacctgcaaatacgtaccaaaaagcaactcccatccggtgagatacattgccgagtggtggaaatgtataaaggataagctgatgggaaaaggtaataatggaccctatatcaggcagttggcggaaaacgaaaatctgtactcatacctgcaaaggcagacacttgaagaagtgcaccgcctctcaggaaaggtatggacggatttcaacgctcatgatcccggggtgaccctggcggatatcgccaactatgcgttgacagaaatggactacaagctcggtttcggtacgatggattacctgaccggggaagatggaatcttcgaacctgaacgtttcggactctttccacccgaaaaggtgtataccactgcccctgttacaccggaggattatcgaagactgttcttcgcccgcattccggaactggaaaacgtatgggtggaatgtaatgcggcaaccggcggctacactgtcaagattgctcttcctccctttgaagaagaggataacggaaaaacggtggtaaagcaggttacgaagaattacaacagccaccgtaacctgtgcgaatacctcgacaaggtaatcatcgtgaggtccgcagaactggaatttcatgcagaatttgagatagagccgggcaaagatgcgtctattgtgttggctaggctctacggaaccatcttgcattatctttccggcggagtgtatatctgtgcgccggaagagctggaaacctccggcttgtcacccgaagagtggttggagggggcggaaggcattgtgcgtgtggtaattcctatgcaaaagaataccgaatatgagttatataagaaactttgtcaggtggaaggcatccggtcgttcagtacttgttacctgatgaaggatggaaagccacagaccgatttctccgaagggttcagcttgaaaattccatgtatggagaaagaactgaaagtacgtatccgtcaggggcgctctgttatgggagtcgatatggaaaagttcacaagatatctgaaaaccttttattatgctcagaagcgtatcagcacgaatgaaagcgacgtaaaaggaattggttggggaaatatggtaggaacgtaccgcaacattttcacctattcccccatagccggagagttccccgcatgttaccgtctctcactcggacaggaaactcatgcttcctttgaggcatacttgaaactgtatgatcggacaatacaacaaggattggaggaagtgaaagaacttccgaacgtgctttccattgaagaaaaagacatggggcgtcattcttcctttcggaatatctatgcactgaaaagtcgttatctggattttcttgatcacctgtacggagtagagagccagcccgaatggttggaagagtcaaactgttatggtgaaatggagagtgagacgattggacggcgaatgtcattcttgcgtcatgttgcctatctgataaaaaatagagcaaaggcgcgggatattacgatgtcggagggagagcataacgctcccatagtgaaggagtggttttgcaggttgttgggcattaacgggaacgaggaacataccgtgggcaatgttcttcccgggcataatctacaactgatagagaagaaacccgaccgtcccctggcggaccgactggatgctctgcttattgatgaacgtatgctggaaccggagcacgtgacggccgtaacttatgagcaactggcaacggatgaggaaggaaagcgtaaagaatatagccagttaagagcggaactgccgatattcaaccggaacaggataagcggcgacttattccgccacggcatttctcttggtaactaccggattgtagaagctaaaaagggtgagtatctgttggtggtccacaataaggagaaaggtggatggaccaatcttggacgtaccgataacaaaaagaggttgaatacgctggcgaacatcctgcggagatatttactggaattgaaccgggagtgtgaaacggtttacgtattggaaccggtattggtgagaaaaacggaacctttccggctactgattgtgcttcctatgtggacgcttcgtttccactcgccgcgcttcagggagatgtgcagggaattattgcgctctattattcccgcccacctggcaggccggatatactggatggatgagataagtatgcaaggttttgaacattgttacaaattattaatgagggctttgaccaacaatgacttggcggattacagcgcccaattgctggaagtcatatacgagttgctgggcaaagccgtggaaatacagatattagatgatgcgaattgaacatatatcgtttgagttcgctgctgcggacgaacggttcgtacacgacttgtatgcggactgggatggcttttgccgtaactattttgaaaaaacggtggatgaatgcctttctcctttggataaagacaaggtgttgcatgaaatagaactgttggaattggatttggggagtatccccgaggaaaacttctaccgtgagtttccccggcgcctcaaagcggaactgctgaaagtgttgccttcatggagcataccgacggagagcgaacggaaaaagacggatgcttcacgcctggaaaatctactgttctatctggaacatggttatcagaaggtggaatgggacaatagtgcttttaacctaacggaagaattggattgggccgttttgcaacaggcgcttcatgcagaggatgtagtatctctctgtatgagaaaagatcacgctttgtgtcgtttgctatggcagacaaatgatgacaatactcttatccgactctataccgacttactttccatgtcatcgtttggcttgtacgagaaacgtcgtttccttgcaatacttctggagatgaaacccggtatacccgtgcgttttattcacgaggataatgatgacaacaggctgcaaaatatggcagaactactcgatacgctgtctgtccgtcggataatggaaacagaaacggaagaacatgccgaagtcgacctgcccccatactggcattatttgtatgaatggcttatcaattattatccctttaacgggattgctatctttgggggtaaaggagattttatccgccatctgcaccatcggttgctcacattcatccgtaagcgaaactactctttctacctctctaaaatggaactgacagtcaacttcctgcttgaagttttcggacctgattattatagggatgtattaaatgctatctatgacctccaaccgcactatgcagacggttcacctgtgtatgacggatatttaaaccgggaattgtatcgtatctttttacaactttctctacttcgtctgccgatggcgggagaaagtccgaaagagaatctggattccgggtggaagcaaacggcatatcctacagatatggaaatggtggcagaatatctaaatgatacgcagaaaaatatggcggacaaacgaagcttatttaggctactgataaaggaaaagccggaaatactgatggattggttacaatcggaggctgccaaagacaacgctctacttagtgttatagctaatatggttgatactgatcttctcaaccgtctgctttcttccgtttctttcatggcgatggaagtggttgaccaggtaagaacctatctactgaaccatatatcgaaaacagaatgtctaaaagggatttctgaaactcagtttaactttattttttgcaaagcagtgttgctttggatagaaaacgaacactgcggtctttcggagtcggaacgtatcgaacaacttctacatcagttctatcaggagttttcaagtggtagtaatgagtcttctatcaaaatattatctgaaaaattgtacttgtcggaagatgtttggaagcaagatgcaggaaatggtaaaatacgtgtcgacattctaaaacttcgacagatattagcagacaagagtataccggaacttgtaaaacgtagaatgacggcattgttcttggaacaatccatagaaaatgaagagaatgccatatggctgttacacgagcatgaagtattggagtatacacttattttaataagtcagccggttttagaagaaattatcaggcggtcggttgtgcggatgaacggtatatctcatattgcggaattgttatccctgtttgattggctggtaactaacgaacaggccctctcagcatatttgaaggataggacattcggactgaaggtacagatgattttatggctggcaaaagtttcccactcgtcaatgaagatggagggcactgcgagagaaattctttatttatttcttatgacattgtttggcaaggaaaatataccgattgtcattaaactggtatttcaaggaagcattagggagacagaaaccaggaatgaggaatatgatgatatggaagcagtactggacctgctgatgactatcgaggcaggtaacgggaatcctgcaaaagtaaggtttgaggaatgggtacggcaaaccaaaaaagactccgacatccttcccatgctgttggaaaaccgctggaacgctggaaatggctttaccgattggctggaagacgctaccatctttacagatgataagcgtgagttgttacagagaatggttgtcgaaaaagtacatgaatgggtggggctactacgtaggcaacccgaagaaagcaaggctgtaatatttgttgcaacctatttgtcagcgcctcttcttctgcaaagcgtggcacaagcggacttccgtcaagcagcggtattgtcggaaacgattgaatggttgcaatgcaaagctgatgggattccattccttaccggaaatgacaggcttttttcaacggctctttcagaagcattgctgttctttatgcaagatagagatacattaggtggaagatccttaacggaaaaagaggtggtaaaaaagttcctggctcatttgtattttgtctataccgggaagactgatttccaaagcgatgcggaatggacgaatttatcggtcaatctggctgttgacttggaaatggaggcatggcaagatgtacgggaggccgagtttgctgatgtattgttacaaaagaatataagcaataccatattcagtcatcatattgtttccgttctggaaaagtatccggagaaatttttggcatggctggagaaggatgctgatctggttttgataaaacggattgtcgatgtatcggatataaccatactggaacaattgagtctgtttttgtctgccgttgcaggatttgaatatcctgatgatttcaggcagttgacaagctggctcagccgattcgctaatgatcgggtatttgcttcagatataaccagaatattgctgttatgggtaagggaaacaaattggaaaaaacaaacgccggaacaaatggaagattatttcatttcccgcctgttcggtaaaaacgtagcccgattaccgatagagtggattgcagatgatactttgccggaaagtgtacgaaaaagaatgctctacaaccatatcttcttccgaccgaaagaactgttggcctacattcgtcagtctgtggtacggaatacattgcatacagataaatggttggaatggatgagtaccggagaatggctgcggctggttgcaagtctgtctctttcgcaagcagaactgttgcagcaagttatggattacatattgataagttatccggttcaaaaggaacatttagagactgctctggtaacctatatcattgaaaatccttcggaagaatgggcgtacaatagcagggaagagaatatacgctcatttgtgaaatcacttcctatcctgcaagaaaaaacagaaaatgaacttaaagacatagtgaatatgataagtgaaaaattaataccggaagaggacaagaattggttaaccggcgaaccggtgtctgattctaaaatattctttgttaataatgcaggtctctgtctgctgtctgcgtggtttctccgattgctgagtatgctcgattacctgaacgaggcaaggaaggatatcaaagatacgaaatcaagaattcgtgccatgttcttgttacaatacctcacttgtcaagaagaaaaggaataccgggaaacagaattggtgttcaatcgtctgcttgttgggttgccgatgcatatcccgttgccaaaacggctggaactgactgccgaggaaaaacaaatcgctgatagcttactgtcggcagtaaaagcgcattggtccaagatgaacggaacatcgttgaaaggatttctgcaaagctttgttacccgtacaggtcgcttggaggaacaggacgaaaaatggctacttaccgtggacgacaagacgcatgacattctactcgattccgttccctggggattccggcagatacgtttaccgtggctgaagaaatacatacaagtaaaatggcacgataagcaggaattctgatattaaatattaaataaagaaatcgtatggaagcagagaaagtacatcaggaaaaagtagcacgtaccatacagcaaaagcaggatggcggcggtgtattacaatttgttgataaccgtatggtgaacacacttttgcaacgtgttggcttagaggatgaagaaggatttcagatgaaaactgcccagttacagtctgacgaggaagaagataccttgcagggtaaatttgaacctactgttcagcgtgtggaagatgatgcagagggcgtgcaaatgaaatcggatactgtatgccaacagaaaccgaataataccggtttgcctgataatctgaaagctggggtcgaaagtctttcggggttttcaatggatgatgtaaaagtacattataattcttcacagcctgccactgtccaggcattagcttatacgcaaggaacggacatccatgtggcacccggccaagagaggcatctgccccatgaggcatggcatgtagcccaacagctggcaggacgtgttgaacctactacggaagtgggtggtatgccggtcaacgacaatatagatttagaacatgaggcggacgtaatgggtgccagagcgaatagcttgtaaaagaatagtctatgaatgaatttatcggatggttcaatcaagttttgactatttctatccagctttatttccaacaggagtgtgaatactcctcgctggaagaagtaaaaccacctgtaaacggatggttggaaaaggtgactggcgttcccgacttgacatttgacgaacggatggtggtcatgttggcgttgatgccgcatgtctgtccgcagatactggacatcttttttgtacaaaacaagaacttcgaccggcaatatacggaattcggtggttggaaaggcttgtcacatggaggttttctgccaactggtgagactgcctcttttatccttgccggagaagatacggaaaaacggaaaggggtgatccggttcttccagaaggatcactggttctacacaaagaatatcctccgtctggaaggtgccggagaaggtgaaccctttctcagtgggcaattgcgtgtatcggaagaattcttaagccgtgtcttgctggacaaggaatataaacctgattataacatcggctttcccgccaaacgcattaccacgcagttggaatgggaagatatggtactggactatcaggtagctaccgaattggaagaaatcaatgtatggatttcctccggtaagactgtcatggaggattggggactgtcccgtattctgaaagctggataccgttcgctgttttatggacctccgggtacgggaaaaacattggctgcgactcttttgggcaagaagaatgagatggacgtgtaccggatagacttgtccatgattgtatccaagtatatcggcgaaacggaaaagaacttggcaaaggtattcgaccttgccgagaaccggaactggattctgttttttgatgaagcggatgctttgtttggcaaacgtacatccaccaatacatccaatgaccgacatgctaaccaggaagtggcttacctgttgcaacggattgaagattttcccggcatggtcattctggcgacaaacctacgctcgaacatagacgaggcattctcccgccgtttccagtcggtagtttattttccgatgccgacggaggaacaacgggctgagttatggcggaacatgcttcctgggaaatggttgggaaaggatgcggaagaattgataactatggcggcggaaacggagttgtccggtggggctattacgaatgtggtgaggcggtgtgcattgcgcatgatccagtcaaagaagaaactgctggataaagtaatgttgaaagaggcattgcagaaagaaaaaataaaaagttgaatgtaagtatgctttttgatagatttaattcgtacagtatttattgcatggtttaagaataaaaatgtatatttgcgaaaactaacttttaaacgttatgagtacaattttgcaattagctccacagaatgtgtggaagcatttttattcgctgactcaaattccccgtccgtctggacacatggagaaaataacagagttccttgtaaactttggaaaaggcttgggcttggaatcatttgtcgatgaaataggcaatgttatcattcgtaaggcagctactccgggtatggaaaaccgcaaaggcgtcattcttcaggcacacatggatatggtgcctcagaagaacaatgatactgttcacgattttacaaaagatcctattgaaacctatatcgatggtgattgggtaaaagctaaaggtacaacgctgggagctgataatggtctgggtgttgctgctatcatggcagtgctggaagataatagcttgaagcacggtccgctggaggctttgattacgaaggatgaagaaacaggcatgtatggtgctttcggtttgaaaccggggacactgaagggggaaattttgctgaatcttgactcggaagatgaaggcgaactttatatcggttgtgccggaggtattgacctgacggctacactggaatataaggaagaagcgcccgctgctgattctgtggcccgtaagattaccttgaaaggcttgcgtggcggacattccggtctggaaataaatcagggacgtggtaatgccaataaacttttggctcgcgtggcacatgatgtgctgattgaatttgattctcagctggcaagtttcgaaggtggaaatatgcgtaatgccattcctcgcgaagcgtgtgctgtattggtgttcaatccggaagatacggaagggctggaagactatattaaagaatatgaggcgcaaatcaatgcggaatatgctccaattgaaagtggcattactttgacgatagagtcggttgaacttcctacagctattgtacctgctgaaattcaggacaatatgattaatgtgctgatggcttgtcaggatggcgtgatgcgcatgattcctacagtgcccgataccgtggaaacttcatctaatctggcaattgttatcattggtggtggtaaagcggaagtacgtattctggcacgcagttcttgcgatacgatgaaagaattcctggcagacagtttgacggcttgttttgccatggcaggtatgaaggtagaactaagtggaggatattccggctggcagcctaatgtggattctccgattttgcatgctatgaagctgtcgtataaacaacagtttggagtagaacctgctgtaaaagtaatccatgcaggtttggaatgtggtattattggtgccaattgtccgggattggatatgatttccttcggacctacactgcgttctccgcattcaccggatgaacgtgcattaattcctacagttcctaaattttacgattttctggtagcaacactggaacaaacacctgaaaagtagagaaatatctatagaatttaaaagcggggagaatgtttttttgaacattctccccgctttttttatttgatatttttattaaaaaaaatgccgttactttataggtaacggcacaaaatatggtgcaaacataagtgtttttccataaatgtgcaaataaagctgttcttttttctataattcttaaaaaaaagagtaattgtattcaaaaaacattcaattatgaaacaaaaattattattggagatgctatcctctactattctggaacttcgtgctaatggtcagtggggcactgcacatgtataccggagcgcacggaattctttctctgcatttaataatgataaggatataccgttctgcaaattgaatccgaaccttttgaaacgcttcgaaatttatttgcgccagcgaagatgtagttggaatacggtatctacttatatgaaggtgctccgagcggtttataaccgggcagtagataatggttatgccttgtacataccaaggcttttcaggcacgtacatacaagtgtatgtgctgatcagagaagatctttagatgcttctgatattggaaatttactttatgaaacagagaaagtacctattaatggtactttacctttagacgtacaaaaaacaaagatactatttgcgcttatgtttttgctacggggaatcccatttgttgatctggtgtatttgcgtaaagcggatatccaggataatattctgaaataccgtcgtcggaaaaccggtcgatcattgacagtggcgttgactcctgaggctatgagattgattcgaatggtggctaatacagataagaattctccttacctattctctttcctatccagtcctgaaggcacagaaacggcttatcatgaatatcaatcggcattgagggctttcaattataaattgtctgtgttgaagaaatggatgggaagtcatgctcatctaagtacgtatactattcgccatacgtgggctacaatggcttatcattgtgaaatacatccgggcatcatatcagaagcgatggggcattcatctatcaaggttacggaaacttatttgaaaccttttcaaaatcaaaggatagatcaagctaatcaagaagttatctcctttgtgaaagggtatgctgctgtcttctaaagagtgggtcggattttatagaatttcattataaaacgctgatatttgatcattgtagaaatgcaaataatcagcttatttcctgggaattattctctggttgtttctcctatttccttttttatagcttatgtattgtagatatgttattgtttatcagtgaaatatcgtatttttctttagtggtttttattaaatattcctctttttcactctattctatgtactcttttcttgcaaattagtttggtaggtaatttctctcatgtcccgacatgttatttgactgataaaagcctttttctagagttttttggtacgttttctctttttattcaacaattccgttacctataaagtaacggtatataatgagatgaggattattgatcagactattattattctttatttttttaaatttataaatttaaagttttttattatgaacaaaaaatttctaagtgcaatcctgttcggggctttaatggttggctctgcggggacatttacgtcttgtaaggattacgatgatgacattgacagtctgcaaaaacagattgatgcaaccaatgtgacattaggcgaattacaagcgttgataaagtcgggagccgttattacgtctgtaagtagcacaaatgatggaatttctattgtgttgagcgatggaaagtcatacaaattgaccaatggtaaagatggtgcaaatggtacagatggtaaagacggtgttgacggtaagaatgctgtggcatggactattggtgctgatggctattggtatgaagatggcgtaaagacagaatataaagctatcggtgttgacggtaaagacggtgctgacggcaaggatggtgttgacggcgaagatggcgaggatggtaaagatggtattgacggcaaagacggtaaatactattatcctaacattgaaaccggatgctttgatatttatcaagatggcgaactagttgaagctactcagattagctggaaagctgcgggagtcagtgccgtattgagtggaaacacactgactttgtcaggagtagatggtgatgcgcaaacagtagtgatctatgttggtaaacagctgggatctgtggcattcataccagaagtaatgagttcagaagttgcttatcctactacaactaatcctttctatcatttagcaacttattgggacgaaaataaatataatactactacaaagcaactgatagctcaaactaattgggataaatcgaatgttgtagccatgctctatcgtttgaatcctgatgatgcttatgtgaaagatgcaattgctagttttgtgaatcgtggtgttactacacgtgcggttgccagtgataaggctgatttattgaatataactggtgaaccgacatttgctaatggagttgctgcagtgaatgctactattaatgcatcaaagcaaagcagtggcaaaaatgatattgcagctatgcaagtgtgggtagggcaaaatgcggtaacttccgactatatccatgtgaaatcaactgctattaatgtattgttggtagatagtatggctacgaagggcggaactctgacagaattttattctcgtacaaagagttttatgggtaccggtgaaaatgatgcttttgttaaggatctcgttcctttgaatgcaactgctaatctttcattcaaatttgatggtgagattgatttgaaagactatgtaggtctttactcttcaactaaaggtataaataagttcttgaccgaccttggtttttatggcatgagctacgtattcagccttcctgccgagtataaatcagatgatacgcagaagacaaatcagcaatggtatgttgaactgaataatggtgttgttaaagctaatgcaacaaaccttgagaatggtttgacaccagctatcggacgtactccggttgttcgtgtggatgcttatatgacctctaatacaggtgcccgtaaattgattgcttcttcttatattaaactatcaattacagcaaatgatcccggaccaggtaaagatgcagatcctattactgcagatatcagttctgctaaacagtatgaatatcatgctctgaaatctggtacgatgagtactgtagccggagaaatggattggagagcagttaataatgtgctttacggtaaaacaggcttaacttcacaaactttctggaactactatggtggtgacactaatacgtatgaggtgaaagtgacgacaaaagagcagaatacaggtagtgagattgttatttttaactataatggtctgatgggtgatgtttgggcttataacgttgcaggttttaatttccagattctgctgaatcaaggtgatactcagacttctaatatcaagattggtgtagacaatagaatcaatacagaaaatcgctatatggatgtaaatggtttgggtgctgaatatattgttacccttactatcaagtctgataacatcaaggcaaagggtgatatcattcttacgcaaaaggtttatgtgaaagaagattgcaagagtttcgattataatccgttgtattatgtagcatcttatcagggttacgataactgcgtgattgttaaggggcaattgaagtctacttgggagatgtcttctaatgtaagcgagcacttcaagatgatcgataacaagaatattttccaatattataatacgatcaacaatgtaactggtcttaactttgcttgggctacaggtactactggtgtgacttatgatgctggtgcgcaagaagtgaaattggatgctgcaatgattaaaccgtatgaagtgaagaatatgacttatagaaccacactggctaacggtgaatattgtgatttcaactataacatcgtattccagaatccgtttgttgctggtacttcaaatgctgtttctgtaaatgatggcattggtaaaaatactgttgagactatgccgcaggttaacgttaaagataatgatggtactgctatctattcttacaatgctacatcaaagacattggttctgtcatcgaaggcaactgatacttataaggtggctgtaccgaccgtggtttatagcttcaagaatgatgatgcatataagaatgtagttagtcagatgggtactaaagctactttgagtgttgatccttctactggtgttgttacttgggaaaacttgggtacaactttgcaaggtactcacaagttgactgtaatagctactgttacatttgaaaacctgtctatagtagcatgcaatattccggttaatttgattggtaaatagttaaagctaatagaattgatacaactactctgtgaagactagtcctttttttcaccatcgtgaaaagtaaaatgttgttgtgtgaggctgtttccagtgggaagcggcctcactctttttctgccatcttgtctcctgccttgtcattcgtttcatttcctgccattcttgcttattttctccttgtctaatcttcttatttttgatgtagatcaagaaatatgttataaaacatacttttctataatatatcgctcgaagtttcgaacaaaggtattatttttgtgttataaaacatgatttcaataggataacaagatttttaaggaggataacaaaatgaaaatgttaaagaaaatttttaagcacatcagcgaagctgataagcacgtttggggttactctacaatttattaaacccctttttatgagtgtgtatttgatttttaggtattagtttaatttttaaggttatgaaaaaaaagatttttaaaacatggagaaacattctcgccgaagtaggtcggaatgagatgttgatgatgggttataccctgaagaagtaaaaaagcatttgaactaaactttatgaagcgaggagtacgtcttgaaaacgtatttctcgcttctttttatatctctttgaaagcttttttatataaaaaacagcttttgtttaaactttattccctttctttgttgttagtacaaagactaacagaatagtatccatggaaaaaattcaaagaatttgtagtttggtgttgctggcagcgttttggggctgtgtgcctgtgttgcatgcgcagtcgtttgacaagttgtggaagcaagtggagcaagcacaggaaaagagtttgccgcaaactgtgattaagctgacggatgagatattccggaagggggaacgcgaaaagaataccccgcagatgcttaaagcctatatgtgccggaatacgtatcagaatatactgacgcccgatagtttctatgtcaatctgaaaggattggaacaatgggcgttgcatgagcaaaatccggtcagccgtgcagtgttgaattcactggtagcgagtatctatgccaattatgcagataataaccgctgggaattgcggaatcgtacttcgcttaatctgggagagacggctctaccggcggatatccgcgaatggagtgccaatttatttgtgaatcaggtaataaaatataccggtgaagccttgaaagactctactgagttactgaagacatcttcacgtacttatattccttttgtgattttaggagatgcaagtgaatactaccatcatgaaatgtatcatttgctggcatcacgtgctatcgatgctttacagaaagtctcgtggtttgatacggattctttggtgaagaaagacattatgggcatttatgggcagatgataaatacctatcggaagatgcctgatcgggaagatgctgccgtactgactatgctggattatatggcttggcgtaaccgtgaaggagatgtcttgcttcgtccccgtgctgtaaaagaaggtgagagcgaagcaccgaaccaatatctacgtgcattagaccgtatcattaaagactatgctaaacgtgatgtatgtgcagaggcgtatctggctaaggcccgttattaccgtaatatgcgtaaatatccggaagcattgcaaacctgtgatgaggctattagtctttaccctgactacaaacgcatatccgcattgcgtgaactgaaagaaagcatattgcaacctcaacttaacctgactgcaagcaaggctacttaccccggtgactctttgaaattgagagtgacccatcgtaatctggatggatttacagtgaacctgtttcatactactttattgaaagaggaaactgatatgccacggatcaatacctctttttataagaaatatgcccgtaaagtgaaggcagaacacttctctttgttgcgcccggataattaccagtcggcagatagtacatacagcatgctgatgcccggcgaaccaggtgtttatgttatgcagattgtacctgatgacaagaaaggaaaaacttctgaaaactatctctatcttactcgcttcaaggtgttgaccttacctttatcgaataaggattttgaggttgtagctttggatgctgagactggaaagcctgttgcagatgctcaaataactttctattccagttacggaacaaagaacaatgaggtgctggagcagaaaactacagatgcttcgggcaaagtggtaatgccgtgggttaagcaattccgtgcgttgagtgctacgaaaggcactgatacagcaatgccattgcagcgtatttataatagctctaatggagtctggaatggcacagatgaagagtttgatgaagtgaagattttaacggaccgttccatatatcgtccggggcagactatctatataaaaggtatagcttatgcccaagagggagataccgccaaggttcttccaaatgaaacttatacggtggagctctcggatgtgaatggtaatgatattggaaagaaaaaagtccgtaccaatgaatttggttcgtttaccacagagtttatactgcctgctgcctgcttgaatggatcttacacgattgaagttgaggaaactgatggccgggcatttatacaagtggaagaatataagcgtcctacattcgatatagtttttgatcctcagaaggattcctatcaagtaggagacagtgtacaggtgaaaggtacggtgcgttcctttaatggtgtgcctttgcaagggttggaactgaactataccgtaacccgtagtctgttttcgtggtggagatcttatgggcagagttccacttcactggcttccggcacagtgacgataggagatgatggaatgttctctattcctgtccgcctgcaaggtgtgaaaggggagaatgccggtttttatacctatcagatagaagcctctgtaaccaaccaggccggtgaaacacaaagtagtgtgaccacgctgtcagcaggcaaccgttcgcttgttttgtctgtcgaaacggaagagcgcatttgtaaggatgacagtatccgcctgacattcgtggcgcggaacctgaatatgcaacccgttgccgtgaagggtgattatcgcctggtacaaactgtagatggaaaacaggaagtccgtttcagcggacagtttacctcgaatgtggaagtattgttgccggaatggaagaatttgccttcaggtgcttacgaactacaattagcagccaaggacgatcagggtagggatgttgattacaagcaaaatatcgtactcttttcctatgacgacaatcgccctccggtagattcacctgtttggttctatgcacgcaatgcggagtttgatgccggacatcctgcccaattctgtttggggacttcttataaggatgcttatgtcatgctggatgtattcagcggtaaaaagcgtttaagcagtacggtttttcaattatctgactctattgttcgttttgatgttccttataaagaggagtatggagacgggatagagtacctgtttgcttttgtcaagggtggtgaattctattctgaaaaggtcaacttgcaaaagcgtatgccggataaagcactgacaatgaaatgggatgtattccgtgataagttgcgtcccggacaagaagaggagtggcgtctgacgataaagacaccgcaaggtacaccggctgatgctgagatgcttgctactatgtacgatgcttctttggataagctgtatcccaatcgtcagaattttaatgtgaactatccccgtttcaatcctcagatatattggtcttatggatatacaggtggagccttctattcttgtcatttctcgatgaaggagtggaaaattccagcatttatctacgatactttttattcggaagaagacataaatgaagcaatgataatcggatatcgttctgtgaagagaacggatgtaacaggaagcgtacaggtgaggggcatagcatctccgcagacaaaaatgatggctatggcggataatgcttctgctgatctgacaaatatgttggccggaaaagcggcaggtctaatgtttgaagaagaaatgtcgcaggaaattggacagacggctgatgatgtagagtcgggcaatacccccgaactacgtacaaacttcgctgaaacggcgttcttctatccgcaactgcgcaccaatgaacaaggtgagatttccttctcctttacgatgccacaaagtctgacgcgttggaatttccgcggatattcccatacaaagggaatgttgaccggtcagttggatgcttctgctgttacggcgaaggacttcatgctgtctcccaatatgccgcgttttgtacgggtaggggataagaccagcattgctgcaaccattaccaatctgacaggtaaatctttgaagggaactacgaaatttattctttttgatccgatgacggataaagtgatttccactcaacgccaagctttcacggtagaagccgggaagacggttcctgtaagcttccgtttcacagtgacggataaacaggatatgttgggtgtacgtatgattgctgacggtggcacattcagtgatggcgaacagcacttgttgcctgtattgagcaataaggaatacattactgaaacccttgccatgccagtacgtggtgaagaaacccgtacgttctctttggacagcctgttcaattacaacagccgcacggccaccgaccgccgactgacagtagaatttacaggtaatcccgcctggtatgccgtacaggcattacccgtattgagtcagccccgtacagataatgctacagcatgggcagctgcttattatgctaattcccttgcttcttacattgccaacagtcagccgcgcattaaagctgtattcgacagttggcgcatgcaaggcggtaagaaagaaaacttcctcagtcagttacagaagaaccaagaggtgaagaatatccttctcgaagaaagcccgtggttgctggaagctactactgaagccgaacagcaagcgcgtattgctactttgttcgatctcaataatctgtcgaacaataatatgaccacccttattaaactacaggaattacaaaatgccgatggcgcctggagttggtacaaaggtatgccgggtagtcgcagtatgacgggatacatcaccgaactccttgtccgcttgccgttgcttaccggacaacagaactccgctgatgccctttccatgcagcaaagagctttcaactatttgcatagccaggcattgcaggaatatcagaatatccgtaaagcagagaaaaacgggacgaagatcgataatctttcatatccggcaatgacgtatctctatctgatagctatctccggtgaaagagtgccttctgccaatgaagccgcttatcgctatttcctctctatggtcggcaagaacctgagttcgaatgcaatgggagtcaaggcgcaatcagctatcattctgcaaaaggcaggtcgcacggctgaggctaacgaatttatcgcttctattaaagaacatctggtgcaaaccgatgaacggggtgcatactttgctttctatgaaagacctttcctttggggaacacaacctatttccgttcatgtggaggtaatggaagccctgaggatggcaggaggcaatgatgcattggtggaagaaatgaaactttggttactgaagcagaaacaaactacaagttggaattcacctgttgcaacggcagacgctatttatgcattgctttgccaagggagtgacttgttggcatcacgtggtgatgtacgcattgttcttggccgtaaagtgctggaaacattctcacctgccaagaccacagttcccggattgggatatatcaaggaaagctttgcagaaggtagtcctgaattgcgtgccaagtccattactgtggaaaagagggatgcaggcattgcctggggggcagtctatgcacaatatctgtcacctatttccgatgtaaaacagcaaggtggtgaactggctgtagaaaagaaactctatgtagagcgtactttgacaggtggaaagaaagaattgcaacccatcaccgcttccacgcaactggcggtaggtgataaagtggtttcccgtctgacgatacgtctggaccgtgccatggatttcgttcaactgaaagatcagcgtggtgcctgcttcgaaccgatgaattcactttccggttatcgctggaacggtggaataggttattatgtggagatagaagatgcttccactaatttctttttcgatagtctgagcaagggtgtatatgtgttggaatatagttaccgcgttgcccgtagcgggcagtatgaagccgggctggcaacaattcaatgtgcctatgctcccgagtatgcagctcattcagcatcagtgaaggtcgaggtggagtagaaattttaaaacttgcttttaggaactctcatttaaaacacctacttttgtgcatcttaaaatgaaaacgaatgaaacgaaccttgatatgtatatatgcgcttgccgccgtagcagtcagtgctacggcgcaaccgcgtttttcatccaataaagaaactcacaacttcggacagatcgaatggaaacatcccgttagcgtgcagtatgtcattaccaatacgggcgatcaacctctggtgcttactgatgtagacccttcctgtgcctgttccgtagcccagtggacacaaactcccattgctcccggtgaaaaggggaagatcgtcgtcgattttgatgctaaggcattggggcattttgataagtccatagctgtttattctaatgcgcagcccaatctggcttatctgcactttacaggtgaggtggtgcgcgagataaaagactttacgaaaacatatccttatcttatcggacagatacgcattgataaaaatgagattgatttccctgatacgcaccgtggcgaaaaacctgtcatacggattggcgtagtgaatctgtcggatcgttcgtatgaaccggtattgatgcacctgccttcctatctggatatgaaagtggaaccgaacgtgcttcagaaaggtgagaaagggcttatcacattaactctcaacacagagaaactgacagacttgggactgacacaggcatcagtttacttgtcacgcttcacaggtgacaaggtgagtgatgaaaacgagatacctctttctgctattctcctgcctgatttctccggtatgaccgatacggacaaggcaaatgctccggtaatccgtctttcggagacagatatagacctgagcgcacaactggctaagaagaataaggtgaaacatgatatacagatcaccaataccggacgctctccgttgcaaatcagtaaattgcaggtgttcaatcctgctttaggagtaagtctgaagaagagcgtgttgcagccgggcgaaaccacccgcttgcgtgtgacgatagataagaggaatatctccaagaagaaacgccacctgcgcattctgatgattacgaatgatccgatgcagcctaaggttgagatgaatatcaaagcgagttaaagatttatgatttcataaatcataaatcttatcataaatcataaattagaaatcataaatcttatcatggaacatcctgaaaacgatgaatcctataaaggattggttgtcaatgcaggcattgagcaaccttcgtctgtcaatccctatcgccgcccgaagcctaaaaagcgtcagcgttccgtagcggagtttgtagaaggtattgtaaaaggagacgtcactgtgctgagtcaggcggttactttagtggaaagtgtgaagcccgaacaccaggcattagcacaggaagttattgagagatgcctgccttactcagggaactctatccgtgtggggatcagtggcgtgcctggagccggaaaaagtacctcgattgatgtcttcggcttgcatgtgttggaaaaatacgaaggtaagctggcagtgcttgccatcgaccccagtagcgagcgcagtaagggcagtatcttgggtgataagacgcgtatggagcaactctccgtccatcccaaatctttcatccgccccagtccgtcggcaggttctttgggtggggtagcccgtaagacgcgtgaaacgattattctttgtgaagctgccggtttcgataagatctttgtagagacggtaggtgtgggacaaagtgagacggctgtacactctatggtcgacttcttcctgcttatccagttggccggaacaggcgacgaactgcaaggcatcaagcgtggtattatggaaatggcggacggtattgttatcaataaggcagatggtgataacctggagcgtgctaaactggccgcatcgcaattccgcaatgctctgcatctgtttcctgctcccgagtcaggatggacgccacaggtgatgacttattccggtttctataacctgggtgtgaaagagatttggaagatgatttacgactatattgcttttgtgaaagataacggttattttgaatatcgacgtaacgagcaaagcaaatactggatgtacgaaagcatcaatgagcgtctgcgcgatagtttctaccacaatccagccatagaagccatgttaagtgataaagaacagcaagtactgcaaggcaaactcacttcctttgttgcagcaaagagcttgctagatacctatttcggagaattgaagaagaattagttacgagctacagagctacaagctacaagtagctgcgctatcatgccgcaaggcacttgtagcttgtagctctgtagctcgtgactaattcacgcttttttcccttccttctcaaagtccgccttcgatttactcttcgttacgatatatacgccaaggaataccagggcgatagctacacctttttcccaaccgaatacacccagtcccatgataatggcggcaatagaagctacgatgggttgcatatagttgtacatactcaccactgtgggccgcagcaacctttgggcggtcataatgaagatataggcaaggaagctaccacctattaccacgtagcctacttgtacgtatgccgcggtagaaatttccgtccactgaatacctgccacatcatgataagagaatggaatatagcacatggaggcatagataaacatccatttattcaatgtgatgggagaatatttctgcgataagcccttgaacacagtcagataaatagaaaagctgatttgcgctaccagacaaagcaagtccccgataatactgctgttaccgttgcttgtggcctgactgcttaatataagtgtcagcgctcccatggcccctacaaaaatacccagtactttcaggttcgtgataggttccttcagataaatggcagcgataatcatggttacgataggaagtgtggttgtcacgatggaggcatcgatgggtgaagtcattgaaagcccgaagatatacactccttgattgaacaccagtgcaaaaagtgaagcaaagaaaatcttcagcatatcgcggtgatccacgtgttcgtgcttacagaatgcagacagtagccagaaacaggcggctgcacctaccatgcggaacgtagttaccgataaggctgaaaactccataagtgcggatttgccgatgggcgccatcagtccccataaaatattggcagtcagggcgaatatgtgcccttgtacattcttattcatactcttttttcttttgaggctgcaaaagaacaactattttttgaaactaaaaagtcttttctctttttatatacttgtagtctgttggaagtatatatcggatgtgttgcatctatatatcggacgtgttgcatctatatgtcggatgtgtcgtatctatatatccaacgccaccgatatatagacgctaaaggaacaggatgaagaagggcgtttagccttctaatacgattcgtcctatcaatcatgctgttcatgcagtgtaaggaaaccggaagatttactatttctcctttttacaggaagtcaagagtttgccagcaagaagttaacttcctgtcgacaaactcttaatttcttgtcgacaagaaattgatactttgtagtatcttgataatcaatgataaaaatcacttatacaaagagggcgtttatatacatatattactttgtttccttacatacctcttacgtattctgtcatggaatcggacttgcctgaaattacatagcttgttgtggatgagaacaagcaatgtaatcattcataacattgcttattccggatcataagactgcttgttttcagatgtattcaatacaattaagtgttgtttcttctttcagtctttcagcttttcctaaactccctgttcatcggcatttcagctgaaagatacctgaaactactataaaactggaagtttcagccgtaacgccaatggacaggggattccgtgaggtctgaaagaacggaaagagttttttctcaaaaatagcggatacggagtgatacttcatttatagtccataacgatgtagaaaggaataagactcaccacagattacacagattcacacagatttattaatctaataatcagtaaaataaaatctgtgtcaatctgtgtaatctgtggtgaattaattcataacggtatatgaataaaacaatcgccttaatcttcttttaaatcatgttgaaagacgtttttttaatttttatgagctatttttgtattctgtaaaaaaagagttaatcaatatcttctgtctgtagaggtgatgcttgttgtactttgtctttaaaaatatttgtgtacttattgattggataaatacttagtttgtattatgaagcgttataggaaaatttcatatgtattagggggaatcttgttccttgtggtgggaatgcttgcttttcaggtatatgagagtggaatggaaggacgccgaatatgtaagcaaaaggcggaattttcactgaaatcagctacggaactttgggcaaatcgggaatttgataaacttggaattccttattctgttggaggaggcgaaccgaataaggaaagcaagcagcgtcgtatagtgctggcggaaggagagacagtggtagcggtcgattcgataaaagaaggaaagcggttgattgcttcacatagcctaagtgcgaagattcgctttctgtttttggtggacaaagcggttttcagtgttttgaatgaattatggcaagaagatttggatgatagccacacctattgttccggtgctcttatgttgcaatcggaattaccgggtgacagaaaaggaaaaaagtttatggccggagactcaacgctgatggccgataagtttaagttgggaacctactatctggatgatatgtattttcttgagttgacggcttatctttcgcttccttccccatggttgtgtgccgattggggaaagaccggtattgtttcttgttctattgtagttgtcttctgtttatgcatatttgtccttctcttttggaataatcgaaaaaaggataacgacgatgaagcggctgatccggatgatttcgtaatacgcatctccgaaaataaatatcaaataggcggagtcctgtttgatgaagaggcgtgtacgcttacttttggagatcaaagtgtggtgagatgttctatgcaaccttataaactactttctgcatttgtccatgcaaaaagtcatttcttatcgaataaccggattgttgaagtttgtggttggagtttagaaaatatcaatattaatcaaaacagaagagtaacagtaagcctgcttaggaagttacttgacaccgaaaagtctcatgtgaaaatagaatccggtcaaaacgagcaaaaagagcagggcttttatatgcttattgaaaaatgataagtgctttattattagtacataaagggggtaatgaaaattttactccccctttttcactcccgtaaatgcaatttgaatctatttgttatttacatttgccggcataataatcattgatgaaaaacataataatcaaatgaaaaacaagatgaaaaattgatgcataagtttggtgttattcctactgtcgatgaaggcgccttgcggaatgtccgtccggctctggcgcaggcgtggcgtagttttatagattacaatcctcgaaacgggatacttgctgttgctactcagttgggtgaagtgctcgaaatttataatctgaaagacagtacgcatgttgtgtgcatgggaccgcatggtgagccggagtttcaggtgtccggggatatggtattcctacgggtatcatgggatttagcgatgtgcaggtgacggatcgggccatttatgcagtctttcatgggcgttcgttcaaggatatagtgcgagatgcccggaatggtattaatcatccggatagcgggcaatttatctatgtgttcagtttggcgggaaaaccgttaaagagatatgtattagaccattacatttgtggcatatcggtagatgagcagcgtggagttatttatgctacggatgtgaatgaggatgagcctatattagaatatagtataaaaactatatagagtaataactaattaaaagaagcagacggtaaacgacttgttggtgcaataagatactctgtatcttgatactcgactgtacaatatatgcgtacttgatatagttaattaaatagatttttactttgaaacaatataaaaatgaagaagtttatgaaaatagcttttgttgcagcatttgcggcaattgcaggttatggtgtttatgctaatcagaaagtagatactatgtcagatttgatgttggctaatgtggaagcattggctcgttatgaggtgaatcctgattgtctgaatggatgtactagcgggaatacgggatgctattgttacaaaacatatccagatcaaagagaagtgaaatggagttgatatttacagctactaaaatatgtttagaatgttccaactaggcatttttgttgtttgctatagtcaatgtaataagaaaaaatcagctttttataggctgatttttttctattgatgtttaaaataatataaataattttattttgatgaaacgtattgtctattttgttttgtttgttttctttgcgagtagttgctttagaaattctgatgtggaaaaatctcagaatcattctactaatatcattgatgtaaaggaatctgtgaaagaaattattatagatactcctttgataggagggtgggcgcgaccttttatcgtaaatgattatctattgataagtgattctcaatccgaagaaaaattaatctctatctttgataagaataatttctcctatttaatgggagttggagatgcgggggaaggacctaatgaaattacgaatatgggggtaattgtgcctgatgaagtgcatcatcgattttttgtacctgattatggaaaattgaaagtattgagttatagtgtggatagtatcttaaaaaatcctttttatcgacctgaagtaaaaggagatatgaaagaattgcaatttccggatagatttgtttatgtgaatgacactttctgcattgcacgttctataatggtcggagaaaacaaatattttcaacaatctttggtgcggtggaatatgttgaccggagaaatgaaattattggttgaagggcatcccaaggtagaacgaaagcgaagccagtttgcggtatcattggaacataatctgatagttgattgctatgctcatcatgacctaatgacgatttatgatcttgatggtaatttgaaatacaatatttatggtccttattgggatgacaagacgagtaatgatatggtttattatgatgctgtggtgatttgtaaagataagattgttgcggcatatgcaggaggacgcaattggagtgacgagggatttcctaattgttttcaagtctatgattttgatggtaattatattaaaacgttgaatataggtcgtaaaatttgtaacttttgttatgatcaggagctgaatagattaataatggtattagataatgaaatacaatttgcctatttaaatttggatggacttatagagtaaaataaagaactaatattagaaaatgatgatgagcggaaggagagacagtggtagcggtcgattcgataaaagaaggaaagcggttgattgcttcacatagcctaagtgcgaagattcgctttctgtttttggtggacaaagcggttttcagtgttttgaatgaattatggcaagaagatttggatgatagccacacctattgttccagtgctcttatgttgcaatcggaattaccgggtgacagaaaaggaaaaaagtttatggccggagactcaacgctgatggccgataagtttaagttgggaacctactatctggatgatatgtattttcttgagttgacggcttatctttcgcttccttccccatggttgtgtgccgattgggggaagactggtattgtttcttgttctattgtagttgtcttctgtttatgcatatttgtccttctcttttggaataatcgaaaaaagaataacgacgatgaagcggccgatccggatgatttcgtaatacgcatctccgaaaataaatatcaaataggcggagtcctgtttgatgaagaggcgtgtacgcttacttttggagatcaaagtgtggtgagatgttctatgcaaccttataaactactttctgcatttgtccatgcaaaaagtcatttcttatcgaataatcggattgttgaagtttgtggttggagcttagaaaatatcaatattaatcaaaacagaagagtaacagtaagcctgctcaggaagttacttgacactgagaagtctcatgtgataatagaatccggtcaaaacgagcaaaaagagcagggcttttatatgcttattgaaaaatgataagtgctttattattagcatataaaggaggttgtgtcaaaacgttggcacaaccttttttgatgatttacagtcctgctatatttccttttgtctacgccgcttttttctcattcatttggtaacaagttgctatattcccgttgtatcgagttataaatagcccaataaatatagatttagcaagtgtaatgaactcctttcctgcttttctcagtcttgcacacatctttttgatattaaaagctatggcaaagaaggcaaagtccattgtcaccttgtcttctcccacatgccggaacctcctgtatgccatgttgtatttcatttgtccgaaaacagcttccggttctatacaccgcctgcctctatgcctgattccttcttctgagagtaacctttcccgtgcctgccgtttatattggtttaaccggtggttgacttctataatacggttcccctgtgctttaaaacaacttccacgcaaaggacagccttcgcatctttgtgctttgtaccgggcactttcggtgatgtatccgctcgctgttttgtcacgtctggttcctatgcggttcatgtgttgccccatcgtacaaacgtaataatcctcccccgcattgtaatggagactttccgcatggaacgggttgggagtataacggggacgctgctctttatggaagtagttgtacttgacaaaggcctctatcccgttttcctgcatgaaccggtaattttcttccgagccgtaaccggagtctgccacaccgatacccggtaagcggttatagcggtgctggaaggagtggaagaaagggatcagggtcagcgtatcggtggggttgggaaacagccggaagtctatgatgaactggttttcagtgcctgtttgtaaattatacccgggcttggtctgcccgttcttcatggcgtcttctttcatacgcatgaatgtggcatcaggatcggtcttggaataggaattacgttctccaaggacttcaaggtgattgtcgtattccatcagcttgtcacgatacccttcaagttctctgacctgtttctttttttcacgcagagctttcttttgttccttgtcctgtgttgcaggctgttgttccagcacttctttgagttcatccactatattagagagcatggcgggagtcaactccacggatgtgtcttttacagagttctcctgcacaatggcttcatccacctgctccagaaggatgcgaatcttattcagcaaccttgtacggttcttttcgactgttttgcgccagacaaaagtatatttgttggccttggactcaatcttggtgccgtcgatatactctacgtcaagactgatgaaacccttgtcagctaggacaagaaccaactgcgtgaagacgttgtttatctcctcctttacacggttacggaaacggttgatggttatgaaatccggatgctcatgaccggcaagccagatataatggatatcacgcaaaagaagcttctctattttacggcaggaatagatattattcatgtaagcgtagataattaccttaagcatcattttaggatgataagctgagcgccccgcttctttataaagcttcttgaaattatcaagattaagattatcaacaactgcattgactatgcggacaggatcgtccgcagctatgttttcatcaattctttgtggaaaaagaacggtttggttgggaatgtaaggacgaaaatgtaactttgccataacgaaaaactttatgcctaaagttacaaaaattttgggtaataacaaagcccgggcttgagaaagtctgggctttgcgcataaaaagagggtgtgccagcattttgacacaacctcttttttactcccgtaaatgcattttgaatctatttattatttacatttgccggcataataatcattgatgaaaaacataataatcaaatgaaaaacaagatgaaaaagattctggtatttatgggagttgtagctattgttataggaggacatgtttacagtaaacagtcatctgtcaagatgtcttctttaatgttggagaatatagaagcgttagcggattcagaaactgatggtgttcactgctttggtaaaggtttggttgattgtccgcttaatcacgacaaagtgtatatgtatgatgctccgtatagcttatattattagcgttatatctatcctgctattcatttcctgtactccagaatcaattgattccagtaaaaaagcatatactgatttcccacaggaacaagaattgaaagcaaggacgatacggctggatacagctttattccgctatccttcccgtctacatgttagggacgggaaagctgtggtgcttgatttgcatggaacagactatttttttcatacgttcagctaccctgatttccgttatctgtcttctttcgggaggcgtggagatgcaccgcaggacatgctctctgccgaaaattttcgatggaatggggcttttttgtggacattagactctaataagtcagaattaacaaggtttgggtttgctttatccggcgattcactgcttcgtcaggaagcggtgaatctggataaggatattctcagggcactcgattttgtgatgtgtgaggactctacctttattattcccgattattcgggtgatagtcgtttttgtaaagtatgcagagatggaaaattgatgcataagtttggtgttattcctactgtcaatgaagacgctttgcagaatgcccgtccggctttggcgcaagcgtggcgtagttttatagattacaatccccgaaacgggatacttgctgttgctactcagttgggtgaagtgcttgaaatatataatctgaaagacagtacacatgttgtgtgcatggggccgcatggtgagccggagtttcaggtgtccggggggtatggtattcctacgggtatcatgggatttagcgatgtgcaggtgacggatcgggccatttatgcagtctttcatgggcgttcgttcaaggatatagcgcgagatgtccggaatggtattaatcatccggatggcgggcaatttatctatgtgttcagcttggcgggaaaaccgttaaagagatatgtattagaccattacatttgtggcatatcggtagatgagcaaagtggagttatttatgctacggatgtgaatgaggatgagcctatattagaatatagtataaaaactatatagagtgataactatttaaaaggagcagacggtaaacgacttgttggtgcaatagaatcccgaatgctccgtaacccctaaaatttagaagcttggcaaagatacaaatttttaatgaaaaacggaaactgatttctgctgttacgatagtgcagtgtgaaatgtgctctaataagatactctgtatcttgatactcgactgtacaatatatgcgtacttgatatagttaattaaatagatttttactttgaaacaatataaaaatgaagaagtttatgaaaatagcttttgttgcagcatttgcggcaattgcaggttatggtgtctatgctaatcagaaagtagatactatgtctgatttggctttggctaatatggaggcattggcctcatcgggtgaaacgacgagctattatcgtttattcccttgttatagtcatctttcacaaaatgagtgtaaattgagtactgacaataatagacctgtctgctatgtattctcttattgtcagtaaaatgagtttgaggagtcatttccttctcttaatttgtttttcctttcttgtttcctgccagtttgcaggaaataagaaagaaattggttacggagaggaggtgcaacttaatgtgaaagaagtcgttgttccgtcttccaatgtcctcaatttgaaatcttactatttgtcgtttgtctatcagactgattctttgcaaatgttgtatggatataattataagattcacgggctagattgcttcaacttaaagaatatgcaatcatctcaaattacatttttgggagatggtaattcggccgtagtacgtccggtgacgggggtgtatgtgcaatcacttgattcaatttggatttatgacggttcgcaacgggctctattgttggatcggcagggacaacttttaaatgcagtcaatttgcgtgatggtttgacatccgatgaacaggtattgatagattgtaattttgcaatttccacttctaaattatattatgacgaacagcataaatcgttactttatggtattcaggatacttccacttctccctattcttttaaggtacgtgaggtgtttttgaacggctcatttcctccggtgatgtatttattgcaatcctctgtttctgtttctgatgtaagcggtggagattatggtaatatgaacgggataaatatttcatttagcgatgatgatatcctttataactaccctgtggaatcgcatgtgtatgtattggatcgtagaacaaagcaaacgaaagtagtagatgcggatagccgttttacaaagaatgtagcggggaaatgtcgatcacggagtgattattcgcagtggataaggcatgccgtagaaaatcctcatttttatgatattatatatcttcctgaaagagagatgtatgtacgtctgcatttgggggagcatacttttgacgcaacgttggatgcagatgctctaatggatgaccgtaatttatatatgactctttttgataaagaatttaatatagtaggtgaatgtagtttagcaactcatcggtataattattatacagcatggactgccgtggggaaaggacttcttgtatttgtagataacttgatgtcttctgaaactaagacagataggttggaaatggatatcatagagatacctatgaaaactgaaaacgaaggtggatataaacttgtaaatttgaattaggggtttactctttatcatagctgcgggtgtgaataagtagtttttttgaattgtttttgtgcagttcttgcgacaattgcagtttacggtgtctatgctaatggtgattttattctgtggtgataaaatagttgtttcatacacaggagaagattggaatcataatgatggggcgaggatgcttcacgtgtttaatattgcgggagattgattatttgaaaacataggatatggttatttttgattggtatgaactttagaaacttgataatcatctttattctattttccctgttttcttgtggaaatcagaagaaagaagatattgcagcattattgaaaacatggagtgggaaagaaattctatttcccacaaatccagtatttacagtacaggataaagatactattgacttttcaacgttgggaaaatacaaaatcctaacttatgtggattctattggttgcataagttgcaaattgcaattggggaaatggaaaacttttatggaagaagtggatagcttagggatggattctgtgaggtttctattttttttctctcctgagaaaagaagagatctactgattacattaaaatcggagagatttatttatcctatttgcattgataaagagaataggttaaatgagttgaatcattttcctgcatcggatatgaacttccacacatttttgctggataaggataataaagttttggctatcggtaatcctatccataatcctaaagtgaaagaattgtatttaaagattattcaaggagagaaagtggaacaaaaagatgaaagtaaggttataagaacgaaagtggatatcggtaaaacctcagtttcgttggggcactttgactggaaaaaggaacaaaaaacgacttttgttttgacgaatgcaggcaataagccgttagttgttgaacacgtcaatacttcctgcggttgtacttcggtggattattccaaagagcttgtgcagccgggaaacgagacggtgttaaatgtcacttataaagccgagcatcctgaatattttgataagacaataaccgtatattgcaatgtggaaacttctccgatagttttgagaataacgggaaatgcagaatagtaataattctcatacgaaaagaagctttggctggtatcttgataagattcttaatctattcttgatgctctgtggggtagtattgatctggatattccttcaagtgctatgtattgccacattcaaaattccctctgattctatggaaccgactttacttgtaggggataaaatcttggtgaatataggagttatgggaggacttttatttaatgtatgggatgctttggaaggaaaggatatacatatatatcgtttgccgggatttggaaatttaaaaaggaatgatgtgattgtttttaattttccttatcataaacagcgttgggatagtattgccttcgatgtgatgaagtattatgttaagcgttgtgttgtattgccgggagatacatttgaaataaagaatgcacgatataaggtacgaggaaaggatacgtatttaggtaatgtgaaagcgcaagaaaccttgatagatttagtgaagagagggaaagcggaagagcagggaattgtaatgagggggtatccgaaggcgcgttgctctatttgaaagatcacacccgtggtaaggatgaacgtatattcgaatataaagatgggaaacagcgattttggtaagaataagaagggggtgtctcggccgttgataaatacatcaaccagtttctgatagtaagtggagtaatggtgatatagataaagttataaattctcagaattcccgttattgggggttattaccggaagaatatattgttggaaaggctgtcaggatatggaaatcagtggataagaggacggatagagtacgatggaataggatattcaaaaagatagaatgatgataggatggatgcataaaatgagagaagctacagttattttgctacagtttgttgctgtttgctccttgctgagtatggtatgtgcgacaactcctgaactgcctgcgggagaaaccatcggccagtgggtgtggtttgggaaagctgtgttggtttcgaccggttgtatcactgcttcttgtttgctacaacttctaggaaaaacttcctggacagatattttgtgtttccggaatttctttgttcatgtggcttggagcctagtattgttaggggcaattgaagccgtttggggcttgcggcaattatatgggttttctgtttccgggcattcacggtatgcactgacaggctctttcttcaatcccggtccgtatgggggatatttagcgatgatattacctgtctgcctgcatttgtatttacgtgcctgtgagtggaaaagcacagatgttcttcataaaatagaaaaagtgacggcagggcttgccggtattctaatcttatgtgtactgccggccacaatgagccgttctgcctggattgctgctgcaataagctgtgcatgggtggcgtatatgcatcgtgacagacgtaagtggagcgtattgtggcggagatataagaaacgttaccttacgtggggagtggtcgggctttttgttctgatattaggaggtgctggtattttctttttgaagcctgactctgctatgggacgtctgtttatgtggaaaattacttgtaaagctatcgtagagcatccttggggatgtcgtgaaggatttgtctatgcttatggcgaagcgcaggaaaaatactttggtagtggagactatgctgtttgggaagagcgcgtggccggaagtccggaatatgctttcaatgaatatctggagttggcgttaacagcaggagttatgcttggtgtcatgttcttctcgactattggggcaggtttgtggctagggacaaaatgggggcgttatgaaatttgcggagcactcatatccttgctcgttttctctttttcttcttatcccatgcatttcccggttttcatggtaaccggtatatgcctgctgtttgcttgtggggccggagatgtgggcggaaaatttcttatttgcggcacttgtgcgctgatatggacagtggggcttaacggtaaatggcaacgggaggaagatgcctgccgagattgggtgtatgcgaggatgctttatcatcagggaaattatactgctgccaatgaggcttaccataagctctatccgcagttggacgaaagaggggaattcttattcgaatatggacacagcttatataaatcaggacgttatgatctgtctaattcgtttctggaacaagcttccttatatagcactgacccaatgatactgaatataataggtaagaattatcaggaaatgcaatactatgagaaggctgaaacgtattattgggcgtcagtccaccgtttgccggggcggatttatccctactatctgctggcaaaactctatgcggagccgggctaccggaatagagagaagtttgagaagatgcaacggattgtattgactaaagagccgaaagtctattctaccgctattagggaaatgaggagcgaagtggaaaagataggagatgattggtgtaaaacgaagattgatagatgaatatgatataacatgatggatatggatacgtctaaggatagttggaatgcttgtttgcagtaccgtaataaacagttgacaaagcaattgaaggattaccagaaggtttcggcattaacaaaatgttcttcttctttgatagtggcaatgggacagttgttgtgtctccatcaaaagccttcctatggcataattaaggatgaagccgaatggagggatctgtttatcgtcatagatttattttatgggggtgtctgtcagaagaattcctccaacgcctacttgtagtgaaatcatagaaagacttctcacgacagttaaatacgaataaatttgctctaacctccaatttattctatatttgcaacttaagtgacaagttcttcaaattgtccgaatatgataaactacttgataaaaattataacgaccctctggttcatattcttttgtctgcaagttagtgttgctcaggagattgatgttaatcagaccagaaaacacctgttgcaaacactacaagacaattccgtagacaaacagcagaggatggagctgtatattgacttgtatgacttgtccgatgatgtgacaagcaaacgtacctatattaacgaatcgctgcaactggccattcagttgaaaaatcagatatatatttttgagacactggatattctttgtcgcagttataaagatgaaccggactctttgcgctactatcagcagataggagaagagtgtctggaaggggcttataaggacttttatatggcatggctcaaagcttttccttctgtttgcaagatggatgaggcagagaaacctgatgaagccaatgaagaaatctcacggtataagcgtcataaggtaaatctctcggataagtcgcaggaagtgcagtgggaaatgatactttgttcggcaatggaatgcattagttacttttcaccgtctgttgccaattcagaagaccgcattgttcatttgaagaacattcaccatttggtcagcggtctgccgttcgaggtcagttataagttcaattggtattatctgacccgtatcgaattcatataccgtgcggaaggaaaagctgaggaagccgctaaagcggtggaggccttggaacagacggaacaactctatgacaatcagtttgaattgcctttctataagagacgcgcttatatccgcacccgtagtcgtgaagccttgcgtatgggtgtttatagcgagcttctttacttcggagatatcataggcaggaaaagggctgatgaaatttattcccggatgaaggaatattatcaggtcaagacgccggaagagaataaagagtggcttttgccgtccgctttccgttactatttttatacggcacagtatgaccttgccatgcggaccatcgatgaactgctggaacaaacggattctgccgatacgaacagtcggacagagttgttggcgaagaagattaacctggttacccgatggaaacaacattacaaagaaggatttgacgctttttgggagtacaccagtctgatggaaggtaatcatgtagaagagacgaataagcagttggccgagatgcgttcgttgtttgaagtggataaattgaagatagaacaggcagagcttcaggcacgttatcatcgcgtcgcttttgttgtgctcatagtcctgcttctggttttctttatctgggggctttatcagtacttgttgacgaaacgactgaaggcaacgaagcaggcgttgattctgtctaatgaaaaagtggctgaggaaagtgaacgtgccaaagcgagtgaccgtatgaagacagaattcctccaatccatgtgtcatgagatacgtactccgctaaatgctatctgtggtttcagtactttgttgctgaatgaagacttggatcaggaagacaagaaagattttccggtcatcattgaaaagaactctaatcaattgaccgaattgttcgaggatatcctgcaagtatcggatttaagcagttcgctggagttatttcctatggaacggatagatatattgccgatttgtgcaggacttctggatatgtgtaagggaaaaacgaaaaaatccggaatcacctggttgtttgaatccggactggatgagtgccttgtaaaaacgaatgataaatatctgcaacacgttgtagaacatatcctgaacaatgccgcgaagtttacaactgccggtactattcgtatgaatctgatgcgtaccggtgggaagattcgtattatggtaagtgatacggggatcggtatccctgccgacaaagccgaatacatattcgaccgttttaccaaactggatgacttcatgcctggcacaggcttaggtctttattcctgtcgcctcattgtcacccgtctggggggggccatttatctcgatacatcttatcgggatggcgcatgtttctgcattgatttaccggatgagaagtgatttttctatttccgggcgtggaaataaaagataatcacgtatatttgctttaattaaaagcaaaaactatggaagaacaagctaattacatcaaacgtatagagatacacaggttgtgggatcgctttgacatagcttgggacttacgtcccgacgtgaatatcctttccggtatcaacggagtggggaaaaccacgatccttaaccgttccgtccactatctggaagaactttcgggggagataaagaacggcgagatagagggcgtacgtgttaccttcgaccgtccggatgccacgtatattccttacgacgtaattcgtagttacgaccgccccttgattatgggcgactttaccgcccgcatggccgatccgaacgtcaaatccgaactggactggcaactttatctcttgcaacgccgatacctcgattaccaggtgaatattggcaacaagatgatcgaactcctttccggtgatgaggaacagcgttcacaagctgcttccttatcccttcccaagcggaagttccaggatctgatggatcagttattcagctatacccgcaaaaccatagatcgccgcagtaatgaaatcatcttctatcaggacggtgaacgcctgttgccctataaactatcttccggtgaaaaacagatgctgattatcctgctcaccgtgctggtgcgcgacaatgcccattgtgtcctctttatggatgaacccgaagcctctcttcacatcgagtggcagcaaaaacttatcggtatgatacgtgaattgaatcccaatgtgcaactgatacttaccactcattctcccgccgtcatcatggaaggctggctggatgcggtgacggaagtgagcgatatttcgactgagatataaataaaggtgataaagtgataatataaccatggctacttctttaaaacataatcttacatccgcctatttcaatgccgccaacaagctttatcctaagaaggcgcggcgtcgcattgtggcgtatgtggaaagttacgatgatgtagctttctggcgcacattgttggctgagttcgagacagatgaatattattttcaggtgatgctgccttcggctacctctcttgccaagggtaagaagatggtgctgatgaatacgctgaacactactgaactgggcaagagcctgatagcctgtgtggacagtgactacgactttctgttacaaggcaaaacgagcgtttcacataagataaacagtagtccctacatattccagacgtacgcatatgccatcgagaatttccattgttatgctgaaagcttgcatgaagtttgcgtgcaggctacgttgaacgaccgtatgctgatagactttcctgctttcctgaagcgttattcgcaaattgtctatccgctctttctatggaacgtctggttctatcgccaacgagatacatatacttttccgatgtatgacttcaatgcctgcacccgcttgcaggaagtcaatgtacatcatcccgaacgaacactggagcccgtgcagcgtgccgttgccaagaaactttccgagatgcgcagacgttttccgcgaaatatcaagtcggtggaggctttgggtgtggaactggagaagctgggactgaatcctgatactacttatctctacatacaggggcatcacctcatggatggtgttgtgatgaaacttcttatccccgtatgtactgtgttgcgtcgcgagcgcgaacaggaaattaagcgtctggctgcccacaacgagcaattccataacgaactgaccagctatgagaatagccagaccaacgtcagcttgatgttaaaaaagaacagcggatacaagaacctttacttgtatcagtggttaaaagaagatataggagacttcctgaacagggagcgttaattactaaccattaacaccaaaattaattcttagtatcatgagcattgtacaacaaattaacgaaggacttcaggctttaggtttcagccagtcattggctgcccagttagatcaatttatagcattcctgggagttctcctggtggcttatctggcggatactgtttgccggaagatcttgctgaaagtcgtttcgcgtttggtaaagcaaacaaaagccacctgggatgacattgttttcgaccgcaaagtgatggtgcatcttagccgtatggtggcacctattcttatttatatcctgcttcctctggcattttccgacgcagagtcggcaacgttggcgcttatcctgcgcttctgtctcatttttattattataatgtttcttagctttatcagcgctttgcttactgcggtttataccgtatatagcgagaaggaacagtttcgcgaccgtcctttgaagggactcttgcagacagtacaggtcatcctttattttgtcggtggtatcatcgttgtcagcatactgattgaccgttcgcccggtgtattactcaccggtctgggagcttcggctgccgtgctgatgttagtattcaaagacagtatcatgggctttgtttccggtgtgcaactttctgccaacaatatgctgaaagtaggcgactggatcactatgcctaagtatggagcggacggtgatgtaatagaagtgtcattgaatacagtgaaggttcgtaatttcgacaaaaccatcactactattccgccttacttgctcgtaagcgactctttccagaactggcgtggtatgcaggagagtggcggacgccgtatcaaacgttctatcaatatcgatatgaacagtgtgcggttctgtacgcctgaaatgttggcgaagtatcgcaagatacagctcttggcaaactatgttgaacagacggaacaagtgattaaggagtataatgaagaacatcatatcgataactccatccttgtgaatggtcgtcgccagacgaatcttggtgtcttccgtgcctatctgaattgttacctgaagagccatccgggggtgaatcataatatgacttgcatggtgcgccagcttcagcctaccgatcacggtataccgttggaactgtatttcttctctgcaaccacatcctggataccttatgaagacttgcagtctgatgtcttcgaccatctgttggctattatttctgagtttgatcttcacgtattccagtcaccatccggtgaagatttccgcgaaaggcttaattgagataatcggcacggattctcgatcttttctctcttagatgagaatttatgccggacagttcctctgaacttgtccggcgttgcctttgtagaagctattgcttcgtgaattatgtgtgtttctcgttttattgtttgatccagttgccgcttgtccagttgtcgcctgtttttacagctcccttatattcggctttggtgaagaaactgtcggcactgaggtctttgccaccatcaatagtgccttcgtagagattttcccaagtgaagttctgtgcagtgaggttgcccgttgctgctgcgaacatatcgttggtgtaaatgccttctttggaagacaatgttttgctgatagctacgtactccagtttagatacaccctctttcagggctgtttcagtttctgtggtttctacggtcagaggttgccctttgccggtgataagcgtattgtaaagttccacttgtgttccggcacgcaggcgtacgccctgtttgctgccaccgttgccaatcagtgtgaggttggcgaggatggggtgggcaacgggagtagcagcgaagttcgtaccgttgttgtcacattccagcagacagtcgcagtcataccctagtgtttccgctgcttcctgataggctacaaggaactgggcttttccgttccagccttcagtccagtcgaaggagtcatcactgcaactggtagatacgcagtattttatgttaacggacccgccgaagaactcgaaaccgtcatcagaaccttggtaagcctggcaatattctactgtggtgccgttgcctacgccatagaaggtgaaaccattggcttcgtgttcctcatcgaaagcgtatccgctgtattcgatacgcacgtagcgcagtgtaccggagttgtcggcatcgttgttacccccgtaaatggcaccgcctatttccgagctgcctgtgccgccggctacgttagtgtgtgcatatccgcagatgtggataccaccccaggctccggcttctttcttttcggaggtcattacgatggggttttcggcagtaccctgtgcatcgatcttggaaccttgttctacgaggatgtagtctacgatgtcatcgtgtttggcgatgatggttacacccggttctattttcagtgtggcgccattcttcactttgtattctccggtcaggtagtaggtttttccttctgtcagagtcttgctggtggttatttcacctttcagctcttcaatagtctcttcggctataccgcttttcagtgtccagccttgtgtccagtcgttacttgcgggtactgcaccctgataggcggcttgagtgaagaaactgtcgtcgctcaggtttttcccgccttcgatagtacctacatagccgttggtgaacatgacgctataattgatgatattgtggttaccgtctttggtgaattcattggaagaatagataccttctttgcagcttatgtccgtggccagtgtgatgtattgcagctcggaactaccatccatcaaagcattttcagtttctgtagtttcggtggtgaggcattgccctttgccttttacaatggcgttgtagatttttgcctttgtaccggcacgcaggcggataccttgcttagactctccgttacctatcagtgtcaggttggcaagtgtggggcaggctacgggcgttgcaccgaagctcttgccgttgttgtcgcactccatcaggcagtcgcagtcgtatcccagttcgtctttggggctttggtaagctacgaggaattgtgctttgccgttccagccttcggtccagtcgaaagagtcgtcgctacagtcggtagataccagatacttcacattgacggaaccaccgaaccattcgaaaccatcatcggaacccatgtatgcctggcaatactctaccgttgtcccgtttcctacaccgtagaaggtgataccgttggcttcgtgctcttcgtcgaaggcaaatccggtgtactctacacgaacataccgcaatgtaccggaattgtcggcgtcattattgccaccatagggtgcgccgcctatttccgagctacctgttccgccttcggcattggtgtgtgcgtatccgcagatgtggataccgccccatgcgcccggttctttcttttcggaagtcatcacgatagggttgctggcagtgccttgtgcatctatcttggctccttgttctatgaggatgtagtctaccacatcgtcatgtttggcaataatggtgacgcctgcgggaatcttcagtgtggcaccattctttacgtgtatgccgccacttagcgtgtaagtctttccggcttccagttccgtatcgctttcgatgtctttcgtcagttcatacttgttgtcttcaccgccgtccccgtttccgggttcgttgttgtcggtacatgcagtgaataaggtcatgcttgccgcaagggccatagtcatgaatttccaatttgatgttctcatactaataatcgtttagttgataaaatgagtttctattgtttgtctctctcaaaatttttcttttctcttacaggtcatagctgaagccaacttcaaagcctgtaccctttctgaagcgttccacttctactttatctccggtggtaggcacttcttgcttgaagaggatgtcttggttcagcaggtcgttgacttgcaacttcaccgcgaaacgccggttgaagcggtaactgcctgtaaagttcagtgtgtgtaccggctgttgcttgatgtctcccagaccggagatacctacggagtggatgcggggaccttgcagattgtagagcagggcaacgctgagttggcgatcgttgctgaaagcgggtgaataggtgaggtctgcatttgccaggtagggcgatgctccctgcaaggcacgctggctgttggtgtaggcaccgccttcgggcagtttcacgttagtgtacatatacgagccgttcacgccgaaacgcaggtctttcactatctctttgcggaattctatctccacccccgttgccataccgttgtccgcattgcggaaagaatgcacggcggaaccacctgacagagtctgtacacgctctatcggtgctttcaggtgcttgtagtaggcggtgatggagagcatatccccattcttttcaaagagttcgtagcgcagatcgatgttatagttgtagccgttttgcaaatcagcgttaccgcgtatctgtgccgaaccgtaggattcctgatagaggaagggggccatttcgataaacgaaggacgcgtcactgtgcgtgagaaggcaaagcgcagactgttcttttcgttcatctggtatttcatgttcagtgaggggaaaaggtcgtttttgttcagttcactgcgttcggcttttccgccatcggtatagtagtctacccattgcttgctgatttcgtagcgtactcccaggttcaccaataacggggctacggggtagtattcagtggcaatgtatcctgcataaatgctgttaccggctgtatagctgtctttgggctgcttcttccggtctatggtgatggaaccgttttctacattttccatgttgaggaaggagtcggtatcgtagatgtcggtgatggtagggttcagtttgttcaggttgtagtagaagcgtgtacccatatagtcacgattcttgtctttataggtgaaaccggcctgcaacttgttgttgtcgccaaagcggtagctggcggtgaggtcgcccacccattcatcttcattcagtgagccaaagtaacgcatggtttcttggcggttcagtttgaagagttttatctggtcatcttcacggatgaacattacttggcggcggtcgggttcgtcgctggaggtcttgctgtacgagccgctccagttgaggtcccactgtttgccgaagtagtgcttgccgtttacttgatggttttgcagactgtagatgtgtgtcacgttgttgctgcctatcagatggtggtcttcgtagtccacaccttcgcgcctcatataagtgtcgatggcattgcgggcgtagaagaaggtatatccgatgtgatcggaagtgcggaaactgtagccgagattacccagtgcggcaatctttaactcgttgctgtagctgtcgtagttaaattcattcagggtatttcctgtagcttctaaggtacgtatggaggcattgtccatggtttgcaggtcgttgcttactcctatggagcccagaacgctgacttcatttccacccagagtgaaacgtttgccgaagccgatatttccgccgaattcgggtagggcagtctttctactaacctgaaaactggtgttaaagaggcggttgtggcgtgcatactcttcaaagtctgttaatgacatgtctatcagtttctgatccagagaaggagtcttgaacagagagccgttgcggtccatccggtagaaatctttgcctagcgtattgaacttgccacctgcattgaagctgatggacagaaaatcactgcctacattctctttggtactgatgtcgatgtgtgcccccgagtagtcggcgaatgcactggcgtcatatactttgctcacggtaatattctgtacggtagatgcagggaagatatccagagggattagtttattgtccggattaggagaggcgatgggaagtccgttcagagtggtggtgctgtaccggtcgcccagaccgcgcacaatcaactgtccggcactggcgatggagataccggttatcttttttacaccttcttccacattgctgattcctttgatactcatttctttggcaccgagattttcaattgcaagggtggctttctgccgttccatctgcagggctcgttcactttccagattctttttggccactacggagacttcgcctaatgcttgtgcatcactttccatctcaaagttcagcaaagtttcggccttgacttttatgttgttgagcaggatgtctttgtatcctatatatctcacggttatggtatatgtaccgtcatttacattcagtgtataattgccgtcaatatcggctaccacaccctgcgctgtcccggttatctgtatggtagctccggtcagtggctctttcgtctgtttgtcgaggacggttcctttgatgtttccagccatggcggtcatggtggaaagcaccaataataaaatgaagaaagatacttttcctaaatccagtttcatgctcatcttttatcgtttcttgtttccggtgcaaagatgcggcaacgaaattacaaccgtaatacacatgtcatacaattgattctcaattaggttacaattaaatgacaagctgaattgttgaaaaaagtggttgataaactcttctgacttactacattaacgaacccaaactttcttttttttgttgatatgaatagagtggaaattaataagtaagcattatctttgcactatttacgaatattaaaagcacaatcgtatgagtggcaaccaatcacatgaggcaaaacgttttcagctcctttcatctgttggacaaataggctggtgggaagcagacttcgctacgggggaatatctttgttccgaatatgtttgtaatttgttaggcttggagggagacactctgacttttcgccagttcggtcaactgattcgtgaagattaccgttgccgtatcacacgtgaattcctttcgatagaagaaatcgaggtatatgagcaaacttttcctatttactcttcacaaggcattgtgtgggtttgttcccgtctgggtgaaaagtggctgacagaagatgggcatccaaaagcatttggtatccttcaactggtcaatacccctgcagacgcacaatccggtgatattctgaaacagtttaatgaattgctgttccgacagcattcagtgtcccagtccttacgtaattttctgaaagataaaagcctgagtgaggtgatttcgggagtattgaaggatgtcctcgaactctttcatggcggacgtgtctatatagtggaatacgatgctgaatatcgcacacaaacttgtacctacgaggtagtggctgaaggagttagtccggaaatagacatgctgcaacaaattcctactaatggcatggagtggtggcttaaacaaatgttggcaggcaaacccatcctattgaatactttatcggatttgccacgggtggcacgtcaggagtctgagatacttgctatgcagaatataaagtcactcatggtggttccgctccggaataccgaacgggtgtggggatatatcggtattgacttggtagataggtactataaatggacgaatgaagactatcaatggttctcctctttagctgatatcattaatatttgtatcagcttgcgtcttgccagagatgaggccgaccgtgaacgtaatttcctgagtaatctctataagtatatgcctatgggttatgtacgcctttccattctttgtgatgaagaaggtgaaccttatgactatcttatcacagatgctaatcagttcagtgccgatttgtgcggttcgcctttagagagatataaagggcgttttgcttcagaaatctattcttcagacaaactgtcaaccaagcttaggattcttgcagatatacataagcatggtctgtacagggaactggatgaatattttgaagagtcaaagaggacttgtcattgtattatttattctcccgaaccggatgaattggtttgtctctatatggatgtcactgagatgcgtcgtacgtatatggctttggatcacagcgagaaactattgcgaaatctcttttccaatattcctgtcggtgtggagatttataataaggatgggatactgatagatcttaataataaagatatggagatatttggggttaaggacaaatcaagtacgattggagtgaacttctttgagaatccgaatgtgccgtccgatatccgtgaaagggtgaaagtggaagatgaacttgacttttcgcaggactatgaattctccaatgtgagcgattattatgaatcggagaaaagaggtggaatagaactttatacgaaaataagtaagatatacgataaccagggcgataacaatggttttgtacttatcaatatagacaatacggaacgaataagttccatcaaccggatacgtgattttgaaaacttcttcctgttgatttctgaatatgccaaagtaggttatgccaaactgaacctgcttacccgtaatggatatgccatcaagcaatggtataagaatatgggtgaagatgaagatacgccattggttgaagtggtaggaatttataataaaatgcatccgcaagacagggtacgtgtattggctttctttgagaaggctaaacgaggggaagctacgagtttcaaaagtgaaatgcgcgtgctcaaacccggaacattgaaccagtggaactgggtacgtatgaatgtggtactcaaccgctatgatccagagaatgggctgattgaattgatcggtgttaactacgatatcactgaattgaaggaaacagaacaaaagctgattgaagccaaagagaaagctgaagaggcagaccgcttgaagagtgctttcctggcgaatatgagtcatgagatacgtacaccgttgaatgctattgtaggtttttcaagtttgctggtggagacggaagatcagggagaaaagcgggaatattcaaagatggtggaagagaataatgaacttctgctgcaactgatttctgatattctggatttatcgaagattgaggcgggaactttcgactttaaaataagagatctggatgtgaatactctgtgtggagatgttcagcgctccatgaaactacgtgtgaagccgggtgttgagcttctattcgaaccgactttaccgtcatgcgtcattgtgagtgatcctaatcgtttgcaccaggtggttgctaattttgtaaataatgctattaagttcactacaaccggctatatccgtatcggatatgaccaaccggatgcaaagcatttacgaatatatgtatcggatacaggtatcggtattgccccggaagcctgtgagaagatattcgaccgctttataaagttgaactcgtttgttcagggcaccggcctgggactttctatcagtaaaagtattatagagcaactgggaggcactatcggtgtggatagtgaattgggtaaaggatcgacgttctggtttattctgccggtggtataagagttacgagctacgagttacaagtgctttgcggtgtaatagcgcaaccactcgtaacttgtagctcgtagcttttgtagctcgtaactaattcagtccgaacgagaacttgtcgatggactgataaaccacgctcgcaaggctcaatacaataataccgagcgtacagatgacaaggctggcacgcgtgtagttatcgctacggaaagtggcgataggctcatcactcttgttgatatacatggacttcacaatcttcagatagtaatagagtgaaataatcgtattcaccaatgcgatgaacaccagcagatggaaaccgccctggaaagctgctgcgaagataaagaacttcgagaagaagcctgcgaacggaggaatacctgccaatgaaaacaaagcaagcgtcatgaggaatgccagtttcggattggtactgtataatccgttatattcttcgagcgtgaaacgctgggcacgaagggcgataatcgtaatcactgcaaatacagagaggttggcgaacatgtaaataagtacataatacaccaatgatgccataccctgttgcgttccggcaatcacacccaacatgatgtagcctgcctgcgagatactggaaaatgccatcaggcgtttcaggttttcctgacgcagggcgaaaaggttggcaagggtgatagaagctatgataacccaataaagaatttcctgccattgatccaccatcggagcgaatgtcttgataaggatagtcatcaatacaaaagctgccgatcctttagaaataacacttaaataagcagttactacactcggggcaccttcgtacacgtctgccgtccagaggtggaaaggaacaagggaaagcttgaatcccatgccggagaagaaaaagacaaatgccattatttgcagggcgctgccgtccaggtgagctgggatatcatcgaaatagagagtacctactgttccgtaaataagcgagatgccataaagcagcagtccgctggagaaaagtgcggtgaggatgtacttggcaccggcttcggcggagtggtggcggtacttgtcgaaagcaaccaatgcagccatcgggatacttgctgtttccagtccgatgaagaacatcaggaagtgtcctgcggaaatcatgaagtacatacccagcagggtagagagcgtcagcatataaaattcgccttgcttgattacagtgtccggtcgtttcagccactcatgtgccatcaggaaaacaatcagcgtaccgacgctgaggatggacttcacgatgctttgtatcggggcgttatggtacataccaccgaaagcatcggcagccggaccgggtatgatggtaatcagcgtgtgtatcgtgagcagcacgacgggcaacatggtgttgagtcgtggattaccgtccttcttgtgagcatcggggctcatgaagaggtcggccacgaagaggatcacgatgacagctatcagcgaaagctcttctttgagaataaggaattgggaatagtccatatctattgaatgataagttattagttataagttattagcataccattattgaaatatactcaccaggggcaacacgctgtctccaatcatattgctgatccacaacggagcaagaccgaggcctgcaacgcagacaatgagaataataacggcagtgcgttcatcccaggtagcatcagtcagcgccagatggtgcttgttggtgcaagttccatacagtatcttgccaaccagtcggaggatatagactgcggtaatcacgatactggtacaggcaatgatagtccacgtgcggtggaaaacatctgcatgctggaaagcaccgttgaagattgtcatctcggcaacgaaaccgctgagtcctggaagtccgagattggcaagtccggcaatgacataacagacagcaaggaacggcatgattttcatcaatcctgaaagctcacgtacgtcgcgtgtgtgggtacgaccgtagatcataccgatgagggcaaagaacagggcagtcattaatccgtggctgagcatttgcaggacagcaccggtacaagccgtttggttcatcatcaggatggcgaagagcacgaggccgcagtgagatacggaagagtaggcgttaatatacttcaagtctgtctgtacacaagccgagaaggcaccgtagacaacggagatacctgtcagtatcaggaatatccagccgagttcctgagcagcttcaggcatcagatacatggcgatacggaaacaaccgtaaccaccaagtttcatcagtacacctgcatggagcatacttacggcagtaggcgccgaagcgtgaccgtcggggctccatgtgtggaacgggaacaatgcaccgagtacaccgaaaccgaggaaggtaagcgggaaccaaatgcgttgctgttcgataggaatattatgcaattgggcaatttccagcaggttcatactggtggcaccggaaccgaaatagatacccagaataccaataagcaggaatgcggaaccacccatcaacatcagtgtcagtttcatggcagagtattccttacgtcctgatccccatacaccgataagcaggtacatcggaatcagtgctacttcatagaacatgaacatggtgaacaggtccgtagaaatgaagaagccgaacacacccagagagagcagggtgaaccaaaggaaatattctttcgtcaacggttgcagacgccaggaggcgaaagtaccggtgaagactatgatggcagagagcagcagcatggctactgaaatgccgtctactcccacggagtagtgtatgttgagtgccggataccagggtacatccgcgcggaagagcatttcggctgtgtctccggcagcacgcgcttgcagataagcaatggttaggcctacggcggccaacactaatgccgatgcacctgtcaccatcaccgtgcgtatctgcttgatgttgcgactcagccagagaccaagtaacatcaacagggggatgagaacaaaaatacttaatatgttcatttttataattacaaattacgaattacaaattacgattaacatttctctactatagcagcaataacaatatcaatgccagcgtacccaacaggaatacgtaagtgtactgttgaatttgtccgctttgcagaccgcgtatttcatcactggtggcattggcgctccaggcaaggaagtcgaagaaaccatctactacgtggcggtcgaaccaagcgatggggcgggagatgcaaccaaagattatcttatgagttacgaactggtacacttcatcgatatagaagcgatgataggcagctgtccataatccgcggaaacgacgtgcaagggcattggcaatgggttgctttgcccgtgcgtacatggctgtggcaattgcgatggagatgacagctatagcaatgctggtacctgccaccgcccagtcgagatgaatctcgtaagccgtaccgttggaagagatgaatttaccgaaggggatgaaaccggctccgatagtaacaacagcaagaaacatcagcggaaaagtcatagttaacggactttcgtggggagtatgttcagcatgaagctctttattctctttgccccagaagatgccgtaatagaggcggaacatataaaatgccgtcattgcagcaatcactgtcataatccagcccattacaggactgaactggaagcatgctgtcagtatttcatctttagagaagaaaccggagaatggaggaatacctgcaatggcaagacaagcaatcaggaacgtaatatgcgtcacaggcatgtacttgcgcagtccacccatagcggacatttcattgctgtgtaccgcatggataatgctacctgcgccgaggaagagtaatgccttgaacatagcgtgcgtgaacaggtggaacataccggccatatagcccagaccgccatgatgcggatcagcagaagtacaaactcccagtgccaccatcataaagccgatctgtgagatagtagagaatgccagcacacgtttgatgtcactttgcacacaagctaccgaagcagcatagaatgcagtgaacgctccaacgtaagctaccagatgcagcacgtcgggtgcataaccgatgaacagcgggaacattcgggccacaaggtaaactccggctaccaccatggtcgctgcatggatcaatgcgctgacgggtgtcgggccttccattgcatccggcagccagatgtgtaatgggaacatggcactctttccggcaccaccgatgaacatcagtcccaaggccagaggtatcattgccgcaccacctttcagcaatgccatttcactgggatggaaggtgtaagttccggcataataaccgtaaataaggataccgatcaagaaacccaggtcggcaaaacgggtaacgatgaacgctttcttgcttgcagcaacagcagacggtttcgtatagtagaaaccgatgagcaagtaagacgaaacacccaccaattcccagaacagatacatctggaagatattggtagccaccaccagacccaacatggacatggtaaagaggctgaggaatgcataatagcgttggaatccgcgctcacccttcatgtagccgaaagagtagacatgtaccatcaacgatacggtggagatgacgataagcatcatcacagaaatggggtcgagcaggatacccaggtcaatgctcagcgttgaagtgaagggcaaccacgtcacattataaggcataagtgtggcgaaagtgccgtccgccagacgcggagcggagaaatactgccaggcagtggcgtagctcaatacggctaccacagccaataccgtggtaccgatgatgcccgccgtccggtgcgtcatccatttgccgccaatccccaatacaaggaaggagaggaggggaagcaggagaatgaagattgtatattccatattcttttcttttttattctattattgatactgtactgattctaccatttcaattcgtccagcttattaacctggatacttcgtatattgcggtagatgttgatcataatcgcgatagctactgccgtttcggcggccgagatagcaatggagaacagggcaaagaaatacccttccattccgtcagggaaaaggaaacggttgaacactgcgaagttgatatccgtagcattcagtatcaactcgatgctgataagtatcgccagtgtgttgcggcgggtgaagaacccgtagataccggcgaaaaacatgatagccgaaactatcagataatattccatgtgaatcataatcaattgtatttagcgtttacgtgcaatcaccaacccacctacgatacacgccagcaacaggatactgactgcctcgaagggaagcagataaccgaatttgtcactactcagcatagagtgtccgatagtcttgatgttgatttccagcggtacaagatcggtagtaacgaggaatttatgtttcaacgtaatgaatactacgatgatggcaccacctacagttgcgcccagaccggccaacagtttgctacgtttcaacttgtcggtagtacggtctccttcgccactcgtcagtaggatggagaagacgtagagcacaacaataccgccggcataaaccatgatttgtaccgagcctagaaatgtgtagcccagcaggaagtagatgcctgccgtgccgaaaagcgtgaacagcagatacgttgccgagcgtaccatgtggcgtgtagtcacagtgagaatggaacacacgctgatgaacactgccagaaagtagaatactacggtttcaagggttatttccatattcttgaattacaaattacttaattacaaattactttgttgcttcactttggggagcagcgggtttctttttctcttctacgtgactgcccggatggttcaacgtcttcaccagctttgtacggtcgaacaccgcatgctcaaagtctgtagcaaacgtaatcgcatcgtgtggacaagctgtgacacaaagttggcagaacatgcacgaaccgaggtcgtattcatactttgccaatatcttctttttcttgccgtcctcagtctctatcatttcacttgttaccttaatggtatcgttgggacatgctatctggcacagcccgcacgctatacaatggtgttcattccggtcattgtgcggcatggtcagcgtaccgcggaaacggtcgaacatctccagtgtcgcacgattctccgggtattgctctgtcactttccggcggcagaagacggtcatggtagttttcatacccgtcagcaaagaaccgatgccgtgcatcagtccgccaaaataactgtatgttttcataatctaaaagtgcagtttaaatacaacaatcagtaccatcagaatgaggtttaccatcgagataggtaccagatacttccattccaatgccaggatctggtcgatgcgcaagcgggggaatgtccatttaatccacatcagcaggaatactacgaagaatgccttgccgaagaaccagatgaagcccggaatataatccattatggcgttgaaaccatccagtcctacaatatgaaatggcatccagccgcccaggaagatggtggcagccacgccggctacaataaacaggttcagatattcggccagatagaagaaaccgaagtgcataccgctatattcggtgtggtatcctgccgtcagttcgctttctgcttccggcaagtcgaacggaccacggttacactctgcatttccggctatcaggtagataacgaaagcgatcactgccggaatgtgtcctttgaagatgaaccatccgtcagcctgtccttctacaatttcagagaactgcatcgtacccatcagcactaccatagtcaatatactcagtcctacagacaactcgtacgagataatctgtgctccgcttcgcatggctccgatcaatgaaaatttgttgttggatccccaaccggccagcagaatacctaatacacctatactggatgctgccagcaggaagaatacacctacattgaaattcagcacttccatacctttattaatagggaggcaggcaaatgtcagaaatgaagctatgatcaccatgaacggtgccaggttgtagaggaagcggtcggcagctttcggagtgaagatttctttggtcagcatcttcaacacgtcgcagatgacctgaatactaccccatttacctacacggttcggaccgagacggcactggaagaaagcacatatcttgcgctccatgtaaatcagaatgatggcgagtacggcatacatcagaatgatgcacacgcctatcactacacattcgaggaatatcgccagaccttccggcatcagggaagtcagcgtctggtgtatccagttggttactatactaaagtcaaacatcttgtaatttacaatttacaatttacaatttacgaggcactttacaatggcaatgcatcaaccgactactcatgcgcagctaaattgtacattgtacattgtaaattgtaccttcctttacctatcaatatctggcactacgtaatccagcgttcccccgattgcaatcaggtcggcaatctttgctccgcggcaaatggtatctacggtgcttaccagtggtaatcccgtggaacggaaatgcagacggtacggagtcttgtcgccatggctttccaggaagatgccgaactcaccacggctaccttctacggcagtataatactgtccttcgggtacacggatgatgggtttcatcttttcctgatatgggccttcggggatgttatcaatgagttgttcaagaatattcatgctttccatgatttcgtccatacgaaccatatagcgtgcccaggagtcgccttcggtataaacgatttctttgaagtccactttgtcgtatactccgtagggatggcgtttacggacgtcgcaagcccagccgctggcacgtcctgtaccacctgtagctccgaaagcgatggcgtcttcacggctcagtactcctacgcctttcaaacgttgctgagcaatgatattgccagtgaacacctcatgatattcgtggatgatgccacgcaggtaggggataaactctttcactcgtttctggaagttgggatgcagatcggcctgcacaccaccgatagtgttgtagttcataataaggcgtccgccgcaggtttcctcgaagatgtcgagtatcttctcgcggtcgcggaaaccatagaagaacgcggtcaaagcaccaaggtccattgcgagacaagagtagaacagcaagtgagagtctatgcgctgcaattcgtccatgatggtacggatatacttcacacggtcgcttacttcaatgcccatagcctgctcaatgcatgcacaaagggcgtggcggttctgatgtgcgcccagataatccagacggtcagtcagtgccaatgtctgcgggtaggtgaggctttcgcacatcttctcgatgccccggtggatgtagccgcagttggcatctatcttctcgatggtttcaccttccagtgatacacggaaacgcattacaccgtgcgtggcagggtgttgcggaccgatgttcacaacatattcttcgtctccgaagagtatcagttctttattctttattgtaccatccgggttaagtgccagttcggtagtggtatcaatggtttcttcattatccatacgtagcggattgtccttttccggatcattgtccttacgcatagggtatcctacccagtcgttacgcaggtagaggcggcgcatgtcgggatgtccaatgaagacgatgccgtagaaatcgtatacttcacgctccaggaaatctgctgctttccagatgtcactgacactgggtaactcggcattcttgcggtccaaggtagcggtacgtacgactaaacgttctccggtagtggtggattccaggtgataaaccactcctaaaccacgcggtgtatccggcgtatccttgtcggttgtttctccccagtccataccggtcaggcattccagaaagtccatctgctgctcttggtgcaggcggagcatttcggcatgcaagtccgtaggttttataaatcgtatattatccatattttgattatgtttcgttattgtagctcatcactcgtcactatccggtttcggttccttccggttcactcctccgaagaatttctctatcttcactttgcgttgcaactgcatcatgccgtaatagaacgcttccggacggggggggcatcccgggatgtacacatccaccggcagaatcttatctactccattcactacgtgataggatttcttgaacggtccgccgctaacggcgcatccacccacggcaaccacgtatttcgggtccggcatctgatcgtataggcgtttcagtacaggcgccatcttatttgtgatagttccgcacaccataatcatatctgcctggcgcggactggcacgggctacttcaaatccgaaacgcgccatgtcatagcgcgcggcacccagtgccatgaactcaataccgcaacagcttgttgcaaacgtaagtggccacagcgaattgctgcgtccccagttgatgaaatcgtccagtacgccgagggcgacattggcacctccggcattaagttcgcgaacgagtttctccaacgtttcattatccgtaaattcttcatacgggatagattttattttgggctttttctttatttccattccagtgctcctttccgccatgcataggcaagtcctaataccaggataagtaagaaaaataagatactaagcaatcccgctattcccaggtcgcgggcaatgactgcccatggaaacagaaataccgtctccacgtcgaacatcagaaacaggatggcaaacagatagtaacccacccggaactgcatccatgatttaccacgggtaggaataccgcactcgtacgcttccatcttctgtggattgtacgaacggggggatatcgccttggacaacgcgataacaatacccacgaaagcaattgccgtcagcaagacgactactaacaaagtaaagttcataaatctaattaacttttagatgtatataataggatagttggtcgaaggtagcaatacctctgaattgccttcgacggaccttggcaagcctgtagaacttgcctgacttagtttatcaaatgattatctttctcagcccgaatacataataggagagtggatcgggcacaggatagaaagcggaatgcaacaacggattgctagccggcgaatcggccagccagtacatccggaagtaatttagcaaaatgaaaaaactcttgttgccgggcacctgtgtgctgtccacattgtccatatataagggcatggacgagaaatgattgtatatattacgaatgttttgctgatgtgaggtaggagcctgagaaaggaaacagcgttcgctatcgttgcttatcaaagtgcacgatatacccgccgcctgagctgcaccgtcgtataataatacgccgagtaggataatcataaagtattttatgcactgtttcattcaactactttttcattcggctgcaaatgtataacaaatattggctattttgttatatagagatggcaaataagtctctttttagcacttttttgccttatatcaacttcttctccagaattccggagtgaaaagtaataatacggtaaataattccagacgtcccagcaacataaggaaagccattaaccacttcgccacatcgggtagtgcattccatgagaaggcgggaccggtttctcctaacccgggccccatgttgccgatactggatatcacgcaccccacagattctacaaaaccaatgcccattcccatcataatcaatacgctgatgataatgattactgcatatataaagcagaaagccagtactgtagattgtatggagggggaaatcacctgcttgttgatacgtaccggaagtattgcgttagggtggaggatatgtttgaattcgttgcgggccactttgccgaggattaccatacggatacattttagaccacccgttgtgcttcccgcacaggcacccatcagcatgacgatggttagcaaaccccacgtcacggcgggccacaacatatagtcgtccgtggcgaatccggtggaagtgtgcagtgaaatcacctgaaacagtgacttgcggaatgcatcttccatgcctatggggttggaataataaagtatcactgcgatcaggccggtaaataatactaccgaccagaaataccactttaactcagcatcgtggataactttcttgaactttcggttgacaaagaacagcagtaacgtgaagttgataccggatatgaacatgaagatggatattacatattcaatatagggtgattggtagtaagctacactggcttgcttggtggagaatccacctgtgcctgtagtggcaaaggcatggcagacactgtcgaaccagtccatcccccccagcatcagcagggcgacaaggatacaggtgataccagcataaatgctccagatccatttggctgtgataccgatgcgcggatgcactttgtcatgtgtaggtccgctggcttcggcagcaaacacttgtaaaccgctgacaccgaatatcggaagaatggcgatggtgaacatgataatacccaagccgcctatccattgtgtcatgctgcgccaaaaaagcagaccgtgggggagtgcttcgatgtcatccaatattgtagcgcctgtgctgctgaagccggacatcgtttcaaagaaggcgttggtaatgctgggtatatatccactgatgtagaacggtagcataccgaaaagcgagaaggctacccaggcaaagctgacgagtacatatccgtccctgcgtgtcagttggcggtcaccgcctttgcccatggctgccaggagtagtccggcgcctgccgtaatgcctgctgatacccagaaatctaccaacgcttcatcctggtaatagaatgaaacgcccgagcaaagcaatagcatcaccgtctccagcaataggaggatgccgataatccgtataactgtcttgaaattaatcatatcatatgaatgaagaatgttcttttttttagttcttcatttaattaaagtacttctcaatcttcttaatcatcatgcttaggcagaatacaactacgtgatcgcccggcagaatttgtgtattacctgtcactacgactccttcgccctgtcggatcaatccgccgatagtggttcccttcggcagcccgagatccttaacctggtgtttggtaattttagagtcggctttcacggtgaactctgcaacgtcggcattggcaaaggtcaggcattttacgttactgacgtcagcatccagcatcatctgatagatgtggctggcggtaatcatcttcttattgattaccgtaccgatgtcgaggctctctgccatacctatataatctatattttctacttccgccactgtcttgctgacgcccatacgtttggcggcaaggcaggaaagaatgtttgtttccgagttttccgtcaaggctacgaaggcttctgtgttcttcagaccttcttcgataagcaggcccatatcgcgtccgtccccgttgataatcataaccttatcgtcaagaagttctgtcaggcggttgcaacggttcaagtcattgtctatgatcttcacctgcatatagtcgggtacatattgggcggttcgcacggcaatacggcttccacccatgatcattacgttgcgtacgtcggcataatcttcctttccggctatcttacgtatataaggtacatacttgcgggtagtggtgaagtaaacgatgtcatgcagtttgattacatcgtcaccgcgcggaatcagtgtttcgttgcagcgtttgatggctactacgtgatagggcttgtctgtttcggccagctggtgcagaggaatatccagtatttccgctttttcacgcatcttggtaccgataagtatcagcgatccgccacagaattcccaccattggcgcacccaactcatacgtatggaagatacgatttctttagcggcaagcatttcagggtaaatcaatgagtcaacacccagtttcttgaaaaattccttgttcttgggcaggagatactcgtaattgtcaatacgggcaacggtcttttttgcaccgaggttggtggccagcatacatgcggtcatgttacggctctcatcgggagtgacggctataaacaggtcagcatctctagcccccacttctttcaatccctgaatggaggtaggcgatgccgtgaccgtcattaaatcgaagttggaactaagcgtgctcaacctctcttcattgtcgtccatcaatatgatgtcctgcttctcgcgagacaacaattttgccaagtgtgtgcctactgcgccggcaccggcaataataattttcattgctctttattactcttatccttgttttgttctaatctcagaacctcttttgcagggtcctgcatttcatccagccgctctttggcagtttgggccatccaaagcttgaagggttcagctttgggggagggaatggattgaatgaggcgaaacatttgctcagtagtcatcacgtctgtcaatctcatcttaccgtcgggtgacaacatttttaactgtacgattttagcgtacagttgactgccttcctttgccaactttgattttaagtcgctccagtatcttcttggattggaactgtctgttagaatttctatcacatcaattacggagaaataccattcctccgtctcgtcatcccaagccgtacgtacttttttctcctcaaatatctttattgcttctttctttgtcatgacaatttatgtttatggcctctaagattccttcctcatccatgccacacagatgatacaattcctgtatcgtgccatgttctacaaacttgtccggtactcctatgcggtgtacgtgcggtgtgtattcgttgtccgacataaattccaggatggcagtccccatgccgcctttccgtatgccgtcttcaatggtgatgatgcgggaaaatgagcgtcctatttcgtggagcatctcctcgtccagtggtttaaggaagcgcaggtcgtaatgtgctattgagatgtttttttctttttccgcccgttcgatggcctttgcggcaatgttccctatcgggccgagggtaacgactgccatatctttaccgtccttcagtttgcgtcctttgccaaccgggatttcttccaacgggcatttccagtccttcagcacaccgcgcccacgggggtagcggataacgaacggacctttgtccggcagctgtgccgtgtacatgaggtggcgcagttcgtgctcgttcatgggcgaggaaattgtcaggttggggatagggcggaagtaggctaggtcgaacacgccgtggtgggtcggtccgtcttctcctaccagcccggcacgatccaggcagagcacaacgggaagtttgagtatggcgatatcatgaatgacattgtcgtaagcacgttgcatgaatgacgaatagatgttgcagaaaggttgcatcccttctttggccataccacctgagaaagtggctgcatgtccttcggcaatacctacgtcaaaagcacggtcgggcattgcctgcatcagcatattcatggaacaccctgtaggcatggcgggagtgacgccgacgatgcgtggattcttttcggcaagttccaccagggtttcgccgaaaacgtcctgatacagcggtggcaggttgtgtgtatccgccgtaaagcgttcacccgtttcgggatcgaactttcccggtgcatgccaaatgcccggagccttctcggcaggttcgaagcctttccccttaatggtgtgcaggtgcaggattttcggtcccttcatatctttgatgtcccgcaggatacgtgcgatgttcttcacatcgtgtccgttgatggggccgaagtagcggatattcattccttcgaagatattctgttgttgggcagctattgatttcaggctgtttccaaagcggataagtgctttacggcgatcttcgttgagaatgcccactttgaacagcatcttggatactttgaagcggagctggttgtatcggtttgaggtggtcaggttgaagagatattgcttcatgccgcctacactgcggtctatggccatctcgttatcgttcagaatgataagcaggttgttggagcttgctgaggcattgttcaatccttcgaatgctagtccgccgctcatgctgccatcgccaattacggcaaccacatggcggtctttttctcctttttcttctgccgctaccgccatgccgagagccgctgaaatggagttcgaagcatgtccgcaagtgaaagtgtcataatcgctttcatcgggagaagggaaagggcggatccctttgaatttccggtttgtggagaatgtttcccgacgtccggtcagtatcttatggccatacgcctgatggcctacgtcccacacgatgcggtcgtaaggagtattgaacacgtaatgcaaggcgacggtcagttctaccgtccccaaactggctgcaaagtgtcccgggttgcacgaaacttctttaataatgtcctgccgcaattctttgcaaatttccggaagctgatcaacgctcagtttacgcagatcttcgggatcagaaatagaatttagcaagttatatgttgttggttctgtcttcatctctgttctgaggattacaaattgcaaaattagtaaaagaaaacggaaggtattcccttttttggggaaaaatatgaatccttgccgctttaacattagttcttctccttttttatcttaatatttcaagaactcttctcctttggattgttccgtcagaatagattcactacatttgtcccctcaaaaacagaatatcatggaagactgctttaattatgattcggtgcctttaaattacctccactgtcttaaccccgattgtgcgcgaagtgaaagttgcctgcgccatcttgttacgttgcatgtgccgcaaagtgtgaagagcattgtaacggtgaatcctgccaattatcctatggatgccggtcagtgtccttacttccgaagcactgtgaaacttcgttatgcctggggcatcagtaccctctttgataacatcccctataagaaagcgttgctgttgaaagggatgattcgtactctctttccaaaacccacttattaccgtatcctgcacaaggaacgtggactctcaccggcagaacaggcggaaattgccgggctttttgcacaagcgtgcattacggaaactcctgcattcgatagttataccgaagaatatgactgggacggatatcatgttccaaaagccgtaaattccctctaagctgttgcctgataggatgatgggtgtgccactcgattcagccgtagtgaaacactcgttcagtcgtagtgggaagtaccttcagtcgtagtgggaggtgccttcagtcgtagtgggaaatactttcactcgtagtgggaaagatattctgttatagtgccggtattgtttcccttacttttatttgcccctttaaaacaaattgattagttttgttgctgtaatgtataacttcgttttcgtatggaaaacatcatatattgacttttgcattaaaaaaatgcataagtgtatgttgaaggcaacattagaacttatttatataaataaatatggaaaaggatatcttttttaatgtagcggacatcgtgaagcgtgccaagcgtgtattgaacttcaaaacagatgctgatctggctgcctacctgggtgtgtcgcgttctacacttagtaactggattgcacgaaacagcaccgacttcccgttattgctgagcaagatgaaggatgtggattataactggttgctgttagggaagggaacccctgtaagtcatttacaaagttgttataacgaactggcgacaggtaatgttgagataatacacaatcccaaaacgccggatgcgatgaaagaccgcagtgtagtgctgtacgacattactgctgccgctaatctgcgtacattgcttgccaataagcaccagtttgtgatgggaagaatacaaatacctagtattcccgtatgcgacggtgccctttatattagtggggacagtatgtatcccatcctgaaatcgggagatattgtaggtttcaaggaaatgaacagcttcagcaatgtcatttatggtgaaatgtatctagtctcattcgatattgatggcgatgagtatctggcagtgaagtatgtgaaccgttcggagcaggagggttgcattaaacttgtgagttataatccgcaccatgaaccgatggatgttccctttgcttccattcaggcaatggctatcgtgaaattctctatccggaagaatatgatgatgtaaacgtatgaacttttctacccctgttgaattaccttccgatctgccccgttttactcaggcggacgaacttctgttgatgggttcctgctttgccaccaacatcggtgcactgcttgcggatgccagatttcgtccggatgtcaatccatttggggttctttataatcctttgtctgtttcaacagctttgcgtgagttggtgacgggcagactgtataaagaagaagacctgtttttctttcgtgagtgctggcatagctcgatgcatcatggtgatttttcttctccctctgcagaagaagtgttgcagcgtattaatatccgtctgcaaacagcgcacgaacgtatccaccatttgaactgcctgatgttgacttttggtacagcatgggtgtacgaacagaaatccacgggacatgtggttgctaattgtcataaacaaccggagtctgtctttacccgtcgccggctcagcgtgcaggagattgtatcggattatacctctctcttctccggtttgattgctcggaatccgaagttgaaagtgattcttacggtcagccccatccgccacgtacgcgacgggatgcacgctaatcaattgagtaaagctacacttctgcttgccatcgatcagttacagacttcttttcccggacatgtcttttattttccggcttatgaactcttactcgacgagcttcgtgactatcgtttttatgccgatgatatggtgcatccatctcccttggcggtacgctttgtatgggagaagttcgtgcagacctgtctctctgaggacgcgttagagattatgcaggaaagtgaaaatatcaataaagcgctatctcataagcccttccatccggagtcagacgagtataagcgttttttaggacaaattgtgttaaaaatcgaccgacttaacaaaaaatacccgtacttagatttcaaaaaagagaaagatatatgtcatatacgattgaaacaatagccgaacgcatcggtgcacgacgtgtgggggacacgccggcaaccatagattggttacttaccgatagccgttccttgagtttccccgaagaaaccttattttttgccttaactaccaagcgcaatgatggcgcacgctatattcctgacttgtattcacgcggtgttcgcaattttgtagtcagcaaagaagcttataaatgggtggaaagcggacaactggcaatgagtaattcggatatgttagctgttaatttccttgtggtcgccaatccgttgaaggctttgcagaagttggcggaacaacaccgtgaacagtttcagataccggttatcggcataacgggcagtaacggaaagacgattgtaaaggaatggcttcatcaattgctcagccctgaacgggtgattgttcgttcaccacgcagctataattcgcagatcggcgtgccgctgtccgtttggcagatgaacgagcagtccgaactcgctattttcgaagctggaatttcggagatgggagagatgcgtgccttgcagaatattatcaaacctaccattggcatactgaccaacatcggcggagctcatcaggagaacttcttctctttgcaagagaagtgcatggaaaaactgtcgctcttcaagaactgcgatgtggtgatctataatggtgatgatgagtttatcagtaattgtgtggcgaagtctatgctcagtgcccgtgaaatagcatggagtcggaaagatatggagcgtcccctgtttataagtaaggtggagaaaaaggaggattgtaccgtcatttcttatcgttatctggagatggataatacctttatactgccttttattgacgatgcttctattgagaactcgcttaactgcctggctgcctgtctttatctgatgcttcctgccgagaagattacggaacgtatggcgacactggaaccggtggctatgcgcctggaagtgaaggaaggtaaaaacggttgcctgctgataaatgatagctataacagtgatctcgcttcactggacattgcactcgattttctttaccgtcgttcgcagagtaacggactgaagcggactcttatcctctcggatatactggaaaccggacagaatgcgccgacgctttaccggaaagtatcgcagcttgccggtagccgcggcattgagcgtatcatcggagtaggcagtgagatatcttcgtgtgccgcacgctttgacatcgagaaggctttctatcctaatacagaagccctgttgcgcgctatttcccgtggagaactgcggttggagaatgagattatattgataaaaggtgcccgtcagttcggttttgatgctttgacggaagaactggagaaaaaggtacacgagaccattcttgaggtgaatcttggagccatgatagctaatctgaactattaccgcagtcggctgcgtccggatacgaagatggtgtgcatggtgaaagcatcagcctatggagccggttcgtatgagattgccaagacattgcaggaacatcatgtcgattttctggctgtggctgtggctgatgaaggttccgaactccgcaaagcgggtattacggcaagcatcatcattatgaacccggagatgaccgcgtttaagaccatgttcgactataaactggaaccagaagtgtatagcttccacctgctggatgcactgattaaagaggcggagaaggagggaatcactaacttcccgattcatataaaactggatacgggtatgcatcgtctgggctttgctgccgaagatatgccgcgattgattgaacggctgaaaggacagaatgcagtgattgcccgttcggtattctcgcattttgtgggtagtgatgcggcacagttcgatgcgtttacacgtggacagattgaaatgtttgaagcggcatccatgcagttgcaggaagcatttccgcataagatactccggcacatctgcaattcggccggtattgagcgcttcccgggtgcacagttcgacatggtacggttgggtatcggtttgtatggtgtcagtcccattgataacagcattatcaataatgtgagcacactgaaaactaccatcctgcaaatacgtgatgtaccccaggaagacacagtaggctatagccgcaaagggcatctgacacgtaattcacggattgccgcattgcctatcggatatgccgacgggttgaaccgtcatcttggcaacggccacgcctattgcttggtgaatggccagcgtgcgccctatgtgggtaacatctgtatggacgtttgcatgattgacgttacggacattgactgtaaggaaggggatgccgtagagattttcggcgatcatctgcctattacggtactttccgatattcttgaaaccattccttacgaggtgctgacaagtatttctacacgggtgaaaagaatctattatcaggattaatcgtccgttcgtgagctgtatatgcttcccggttattcggcttgacacagaaagttttcgttttaatctgtgtaaatctgtgtaatctgtggtgaaactattatatttgcaacaaatttaaaagactacggatatgacaaacttacttttattaggctttctgcccagcggttccgaatgggttatcatcgccctgttaatactgttgttgtttggtggtaagaaaatccccgaactgatgaaaggactcggtaaaggtgtgaagagcttcaaagatggtgtgaatgaagcaaaagaagaaataaacaaggcaaaggatgatatagaagagccggcttcaaaaaataaatgagttacataagctacgagctacaagttacaagctacaagtggctgcgcgattatgccgcatggcactcgtagcttgtaacttgtaactcgtagctacttactactatggcagataaggaattaaccttttgggatcatttggacgaactgcgtcgtgtattgtttcgggtactcggtgtatggtttgtattggctgtcggttattttattgcgatgccgtggctgtttgataacgtagtgttagctccctgtcacaatgacttcgttttctacgacgtgctgcgctatgtgggaaaagttttcgatctccatgatgatttcttcacacaggatttccacgttaaactaatcaatattaatctggctgccccgttctttattcacatgtccactgcattctggatgtcggtggtgacggctacgccttatattttttttgaaatctggcggtttatcagtcctgcgctctatgctaatgagcggcgtggcgtgaagaaagccctgtgcattggtacggtgatgttcttcctcggtgtacttctgggctattttatggtctatccgctgacgctgcgtttcctttccacctatcaattgagcgcggctattgagaaccagatttctttgaattcctacatagataacttcatgatgctggtgctctgcatgggattggctttcgaattgccgctagtgacgtggctgctttcgctcttgggactggtacataaatctttcctgcgcaaataccgccgtcatgcactggtgcttatcgtgattatttcagctatcattacgccgactggcgaccccttcaccctgactgtggtttccgttccgctttatctgctctatgagttgagtatcctgatgattaaggataaaaagaccgacgcggacgagactgatgaagagaaggaggaataatgaaagaagaagcacgggaatactaccatttcttgcttactgtctgccaggatgaaaatattccgctggtaacagtttatcgtcagcttcgtgaagttctggaacgcctttgccgtacgcagatgccggacggtagcctgcaaatgacggacctttccgctcgtgtcagttttgtggcctcaaaagtggggctctccgtagtggaacaaaaccgcttgcacaccttccgactgacttccaatgccgtactgaatcggcaatccgaaccttcacgtgagaatctgttgcgtgacatcaagacattgaccttctttgtgaaacggttgacgggtgaggatatccctgctgaactatatcatcagcttccccgtgcagatgccacttatattgttgctccgcctgcaaaagaacggatacgccggatgcgtgtctgtttccagtatgctgacgacacttttctatatgtattgcctgtagataccgttgccgatgaaccactgagggtacgctacaatgtatctcaggtgaatgaggaatttgccgagacttgcaaactgctgtggcgtcatgcgcaggttaacctgctggatgtagctgtagatgaggctggtatactgacgccttcctttattatactggaaccggactatctgttggatatcagctcgttggcagagtgctttaaagattacgggcatcatcctgccaattatttgctggcacgcctgcaatctcctgacaatacgcgtccgctgttgcttggaaatatcgccaatctttttctggatgagtggatctatgccaagaaggaaccggactatctgacttgtatgaagaaagcgttccgtacctattccattgatttggccgcgtgtgctgatttgttggataaagaaaaggaaaaggaattcttcgctgattgtaaacggcacttcgaccatatccgacaaacggtgacggagactttccgtgctcccggttatgaactggataagacggatgccgtactggaacctacctatatttgtgaagctctgggattgcaaggccgcctggattatatgcagcgcgatatgtcttccttcatagaaatgaagtcgggcaaagctgacgagtattctatccggggcaaggtggagccgaaggagaataataaggtacagatgttgttgtatcaggcggtattggaatactccatgggaatggatcaccgcaaggtaaaagcttatttgctctatacccgctatccgttgttatatcccgctcgtccgtcgtgggcgatggtgcgccgtgtaatggatgtgcgcaaccggattgtggcgaatgaatacggtatgcaattacgtaatagtccgcactatacggcagagcggctgaaggatattcatccggatacactgaatgagcgccacctgaacaatacattgtggaaacgctatctttaccctgccattgatgccgtgatgcagcgtcttcgggcgcttacaccgttggaacaatgctatttctatacactctataattttattacgaaggaactatacacttcaaaatcgggagatattgattatgaagggcgtacaggtgctgccgccttgtggctttctacgcttgaagaaaagtgtgaagcgggagagatattatacgatctgacaatcacagagaatcatgcggcggatctgcataaagcataccttgtgttggcacgggctaatcagcggtcggcgcagacattgccgaatttccgtgaaggtgactccatcgttctctatcaacgtaataatgatacggacaacgtaaccaataaaatggtattcaaaggaaatattgagcgaatcaccgaccgggatatccgtatccggcttcgtgcttcgcaacaaaatacttccgtgcttcctcccgacagtcgttatgccatcgagcatgattatatggatacttctttccgcagtatgtatctgggactttctgcctttctttctgccaacaaggatcgccgggacctgttgttattccagcgacagccggagtttgacgtttcttttgatcctcgcattgcagttgctctggatgatttctcccgtatcaccctgaaagcccaggctgctaaagattattttcttttggtaggtcctccgggcaccggaaagacttcccgtgctctacgcggtatggtggaagccttctatcgtgaggggaagcagatattattgctctcgtacactaatcgtgcagtggatgaaatctgcaaaaccctctctgccattacgcctgagattgatttcatccgtatagggagtgaactttcctgcgatatacctttccgttcacatctgatagagaatgtgctggaatcctgctcttcacgtcgtgaggtgcatgcctgcatagagcgttgccgtgtttttgtgggcactgtctccacattctcctccaaaacggaattgttccgtctgaaaactttcgatgtggctattgtggatgaggctactcagatactggaaccacaactgctggggcttctttgtgcgcgtaatgtggcgggtggaaatgctattggtaagtttattctcattggtgatcataaacaattgcccgccgtcgtgcttcaatccgaatcccaatctgaagtctgcgaggactgcctgcatagcatcggtttgcataatttgaaagattccctttttgaacgcctctaccggaattctgccgataccactcatcacttatcactcataactaaccgctcctacgacatgctttgtcgccagggacgtatgaatgtggaagtggctcgttttcctaatcatgccttttatggcggactactggaacctgtcggtttgcaacaccagcaaggggaactgacacttgctccggggttggaaaatgatgaatttgcagatatactggtgcgtcgtgtggtttttcttgcctcagtgccggaggtcgcttcgcaatctgcaaagattaatcattttgaagcacagctcgtagccagactggcagctgctatctatcggcaatatgacggtacttccggttttcgtcctgccttgactttggggattatcactccctatcgtagtcagatagctcttattaaaagtgaaatagctgctttgggcattccgtgtttaaacgatatcctggtagataccgtagagcgtttccaggggagtgagcgcgatgtgattatttattccttctgtgtgaaccgtacttatcaattgaaattccttgccaatcttacggaagagggtggggtatggattgaccggaaattgaatgtggctctcacccgtgcccgtaagcaattgtttatgacaggtgtaccccatctgctacggcaaaatcctatctatgcggacttgttggatagtattttctaaaatggaaggaactgtgactttcaggaggataatccgagtcccatttagcaaatcttaaacgttcctcttttctttatatattttattagtatttttgaatgtaataaacccttatctttgtcgaacgtttttttcatagagatttagatttaaggttagaagaattgtggaagtcgtgagacttccctttttttcatcttaaagttttgcgctcctgtatctctcatggaccgttcgaaggtaaatttgctaaagtatactgaggttcatgtttttcacgggagagtgcagaagagagtcgcttcgtgagaaggggctttttttgtgccggtacttttctgtcttttatatatatcaaaaaaggtgctcactgctgagcaccttttttattatctatatatactattccagtattattccaatacaataggtttatacttcggaaccagagccttcattacaacccaaccaatcaggtaagctactgcgcatacacagaagatgatgaagtatcccgcaggtttaccggagaagcccataaattccatggcagggcgtacgaactgtgcaccttgttccagtaaatcatgagtcatttccacttcttttccatctaccattgtacttcctgatgaatatacgaacaagttacctgctactttctgaagaatcattgaaccgaaaccaccggccataccaccgataccagtgatacttgcaatggctgctctcgggaacatgtcacttacggtagagaaaatgttggcagaccaagactggtgagctgcaccaccgataccgatcatgataaccggtaaccacggagagatagtacccagaggctgtgccagcaatactaccagcgggaagaatgcaaatatcaacatggcacgcatacgtgctgcatacggattcaaaccggttctgttgataatgatagtaggcagtttaccaccataaatagaaagcatcgtgatggcatacagagtaaagatcaatgcgatacccaatccttcggaagtcttgataccgaattgcgtattcagataagaaggagtccagaacagaaagaaccaccatacaccatcggtcataaatttaccgaaagcaaatgcccaagtttgtttgtagctgaagcattgccagaatttcatcttcttctcgtctttttcttctacgacaggagcagcaccttcttcgtgcttgtcttgctcaatgtaatcaagctcagccttatttacgtgcttgctttcagaaggtttagagtacatgaatacccagaagcccatccagataaatccaagaccaccaattacgatgaaagccatttcccaaccccatgctttagccagcaaaggaattgtcaacggagcaaccagagcaccgatagaagcaccggcattaaagattgaagtagcatacgcgcggtctttcttagggaaatactcggcagttactttgatagcggcagggaagttaccagcctcaccaagtgccagtacacaacgggctgccaggaagcagtacatactaatagtagcaatagttactaccacatcacctgtggcacccattaattcggctgcactatgcagacctacgaaatgctcggttacgataccacaaagagcgtggagacaagcacctgccgaccatacaccgatagcccaaaggaaacctttctttgtacccatccagtcaataaagcgaccggcgaacaacatgcagactgcataaacaatagagaaaacagaagtgattgttccgtagtgtgattcatcccaatggaattcgggtttgataaattcatcccacgtcaatgacagcacctggcggtcaaggtagtttactgttgtcgcaaaaaatagcatggcgcagatggtccacctgtagttggtcatctttcccactgcattttgatttaaactcatgatacgttgatttaaaattattaattcttatttctggggccaaaaatacacattatttgatgtatatcaatacttttttcgtctaatttcctgcaatttttgttcgaaatgcaaataaatggcaaaaaaactcgttatcgtgcacgaaaacactcgttctcgcacacgaaatactaagtttatagaaggtgaaaataaataatgcaccttttcagtcgaaaagtacacaacgctttaggtgagaaccgctatctttgtcacattacttaatataatctatatacctaaaaacaagaacagaatgatgaacaatctgctttgtaaaacttttgtgatgggagcgctgatttgctccactcagttgtctgctcagaaagtaagcgataagcaaccgtggtcggtacgtatggtagaatcggagatgattcgttgcccggaatcctggcaactggatttccagccgaaactgaaatgggattattgtcatgggctggaattacaagccatgctggatgtgtatgatacgtatggagatcagaagatgtttgactatgcactagcttatgcggacaccatgatacacaaggacggaagtattgagacctataaactgaatgaatacaatatcgaccgcttgaattcaggtaaattcctgttccgcatctacgaacagacgaaagatgaaaaatataagaaggctattgatttgttgcgtagtcagcttgacacccatccgcgtaatgaggacggcggtttctggcataagaaagtatatccgaaccagatgtggttggatggtctttatatgggggcacctttctatgctgaatatgctttccgcaataatcgtgtacaggattataaagatattgtgaaccaatttattacagtggcacgccatacgtatgatccgaagaatggactttatcgccatgcctgtgatgtcagtcgtaaggaacgttgggcagatcccgttaccggacagtcacagcatagctggggacgtgcgatgggatggtatgcaatggcatttgtagatgcactggactttattccgaaacatgaggcaggacgtgattccatgctcgttatccttaataatattgccgcacaggtgaagcgcatacaagatccgaagaccggattatggtatcaggtgttggataagagtggtgagaaaggaaattatgtagagtcttcctgttctactatgtttgtctatgctttgttcaaagctgttcgtaagggatatattgataaatcgtatctgaaagtggctctcaaaggataccaaggtattcttgataacttcatagaagtagataaagacggtgtggtgactattaccagagcctgtgcagttgccggcctgggtggcaaaaactaccgtatgggagattacacctattatataaatgaaacaatccgcagcaacgaccccaaggcagtaggtccgtttatcatggcaagtctggaatgggagcgtctgcaacaagtaaaggaaatcgttaatcagaaataagacaatgaaacggctaacttattatttatgcggcatacttcttctcctggtggggatcatgccgctatcggcacagtctcaatataaagatacgcttgtggttgcccgtgatggttcgggagactatcgcacgttgacggaagctatggaaggcattcgtgcttttatggattacaaggttacagtgctgataaagaatggaacatataaggagaaagcgataattccttcttgggtgcaaaatgtggatttcatcggtgaaagtgtggaaaatacgattatcacgtatgatgaccatgccaacattaataagatgggtactttccgtacctatactgtaaaagtgcagggaaacaatattaccttcaaaaacctcaccatagaaaataatgctgccagactgggacaagcggttgctcttcacacggaaggggataaactggtatttatcaactgccgtttgctgggaaatcaggataccatttatacaggtgccgcaggtacacgcctttatttcgtagattgctacattgaaggaactaccgactttattttcggtccttctaccgctttgtttgagaactgcgaaatccgtagcaaaacaaattcatacgtgacggcagcttctacgcccgaagacattgcggtgggctatgtttttaaaaattgcaaactgacggccaatccgggtgtggacaaggtttatctggggcgtccctggcgtccgtatgctgccaccgtatttatcaattgtgaaatgggtaagcatattcgtcccgaaggatggcataactggggaaaagaggaaaatgagaagacagcccgctatgctgagtacaatagtacaggagaaggtgctgcggtagccggtcgggtaaaatgggcgaaacagctgaccaagaaagaagcagcccaatacgatgatctgaattacatctatcggatgtgtagtgactggaaacctgaaaattaataacttagcttcctgtctacaaagagccaacttcctgcttacaaggagttaactccttgtcgacaggaagttaactttttgttggcaagaagttaactccttgcagacaaggtattagcgctttagaaaatccgctctcatggggctgaaacaatctatcagaataccagcttccagacatacgcacccgtgttccgcatccggttcaatgtagacgccgtctccggtttctacaatttgtttttcaccgttcacggtaaactcaaatttaccgcttgccacataggtggtttgtgtatggtagtgggtgtgtggtgtaccgatggcaccttgctcgaattttactttaaccagcatcacttgcccgtcgtagcccattatttggcgtactactccttcgcctgccggttcccatgcgatttctttttcaagaatgaaagtgttacttcttgtctttttcattttgttgccagattagttgttttgccggcaaatatacgattaatattaatttttctaccgattgcgactttttttacacttcagatcctttgtttttgggtaatattgcaccggaaaataataatactatttatattttgatgaattatgaaacacaagttgacattattgctggggttgtttttcctgctctcggctttcaaggctgacaagcctgtgattacgattttcatgattggagactccactatggccaataagtcattgacaggtggaaaccccgaacgtggctggggacagatgttgcccggctatctttccgaggaaatccgtgtagacaatcatgctgtgaatggacgtagttccaagagttttattgacgagggacggtgggaaaaggtaatctcacaggtgaagaaaggggactatgtatttattcagttcggacataacgatgagaagtccgatccgaaacggtatacggctccgggaagtacttttgatgagaacctgaaacgttttgtaaacgaaacccgtgccaaaggtggtattcctgttttgtttaactccattgtacgccgtaattttggtacggcaaatgggaatgcagtggctcaggctattagtcaggatgatatacagaaaggagtgaatccggatgcaaagcgggaggcttcggagcaacctgctgttactgaaggtgacaagctaattgatacacacggtgcttatctggattctccgcggaatgtagcgaaagaattgggtgtggcttttgtggatatgaataagattacgcatgaccttgtagagggcatggggccggtagactcccgaaaattatttatgtgggtacctgccaatcaggttgccgcgatgccgaagggacgtgaagataacactcatctgaatgtttatggcgggcgtgttgtggctggtttggccatggatgccattgccaaggaagtaccggaactggctaagtatgttcgacactatgattttgtagtggcgcaggatggtagcggagatttctttaccgtgcaggaggctattaatgctgttcctgatttccgcaagaatatccgtactacgatattggtgcgtaaaggcgtgtataaggagaagattgtgataccggaaagtaagatcaatatttctctgataggtcaggacggggcagtgctttcgtatgatgattatgcgcagaagaaaaactgctttggcgaagaaaaagggacctccggttcgtcttcctgttatatttatgctcctgatttttatgctgagaatattacgtttgagaactcttccggtccggtagggcaggcagtggcctgtttcgtaagtgccgatcgtgcttatttcaagaattgccgtttccttggctctcaggatacactttatacgtatgggaaaaattgccgtcagtactatgaagattgctatatagaaggtacggtcgacttcatattcggctggtctacggctgtcttcaatcgttgccatatccatagtaagagcggtgggtatgtcactgcaccttctacggatcagggacagaagtatggttacgtattttatgattgtcgcctgactgcggatgacggtgtacgggatgtcgctctttcacgtccctggcgtccgtatgcgcaggctgtgtttatccgttgcaatctgggcaaacatatctctcctgccggctggaataactggggaaataaagaagcggaaaagacagctttctatgcagaatatgaaagcacgggtgagggtgctaatcccaaagcgcgtgttccttattcccatcaattgaagaatctcaaagggtatgagatggaaaccgtacttgccggagatgacggatggaatccggtgaaaaatggggatgaactgctaagcataaagcgctgattgatatttggatttgataaataaacctataacaattagaacacaatgatgaaaaagaatttgtttgtattactgctcgctctgatacttccgttttcgtttgtatgtgcggagaattacccgtatcggagtgatgtgctttgggttaccgtgcccaatcatgctgactggatttataagaccggagaaaaggctacggttgaagttcagttctataaatatggtattccgcaggatggagtaactgtatcttatgaaataggcggtgatatgatgccggcagaaacttccggttcggttgcgttgaagcagggaaaagcggttattcctgtgggaaccatgaaagaacccggctttcgcgactgccgcttgacagccactgtggatggaaaaagttataagcatcatgtaaagctgggtttctcaccagagaagattaagccttatacgcagatgccgaaggactttaaagagttctgggaaaacaataaagcggaggcagccaagtatccgttgacttatacgaaggaattggcaaaggaatattgcaccgacaaggtggattgctatcttattaagctgatgttgaacagtcgcggacagagtatttacggctacttgttctatccgaagaatgcaacaaaaggttcttgtccggtagttctttgccctccgggtgccggaattaaaacaatcaaggagcctttacgtcacaaatattatgcagaacaaggctgtattcgttttgagattgagatacacggattgaatcctaccttgacagaggaggcattcaaggaaatcagcaacgcttttaacggtagagagaatggctatctgaataatggacttgataaccgtgacaactattatatgaaacgagtgtatctgggttgtgtgcgtagcattgacctcctgacttccttgcccgaatgggatggtaagaatgtaattgtccagggcggtagccagggaggagctttagctttgattacgaccggtttggatcctcgtgtaacagcttgtgtagccaatcatcccgctttgagtgatatggcagggtataaagcagggcgtgccggaggatatccccactttttccgtaccgaagggatggatacgccggagaagttaaaaacgatggcatattatgatgtagtgaactttgcccgtctgataaaggttcctacttatattacctggggatataatgacgatgtgtgtccgccgaccaccagctatgctgtttataatacgctggattgtccgaaggaagcattgatcaccccgattaatgagcactggacttccaatgatacggaatacggacagttgcagtggatattgaagcatctgaaataaataaaatctatcttatttctcatccccccggatctctcttcaataaaaagagtgaatccggggggattttttgtgattttactgtgagaaaatccccctatccttttgtctgcggtgttttgagtggtatagagcgatttttccaccgattcaagcatatttttcacctgagagagatagattatctgctattttgcaagtgcaaggcagacataaatgctttgtagtgaattcagaatttgtttaatcaataaatcatttacttatgaattacaggaaaaaggtcgtgttaatgctcggggttttgtcctacctcaatttgggaactttttctcaagctgctcccctgacagtggatcatacttcagtagccggtgtgcagcaagcctccaatgacaagaagacaattaagatttccggttcggtcagagatgcggccggtgaatctattattggtgctaccattttagagaaaggaacttcaaacggtgtcgtttccgatatggacggtaacttttctatgactgtggctgctaatgggatattacacatctcatatataggttatgtagaccaggacatagcggttgcaggtaagagtcttttcaatattcagttgcttgaagatacggaaatgttagatgaagtggttgttatcggttacggtacggtgaaacgtcgtgacctgacgggagccatagcttcggtaaaaggagatgaggttgctgccaatcctgtatccaatgttgcacaggccttgcagggacgtctgccgggtgtgaacgttgtgtcgcaggacggtcgtccgggagctacaatctcggtacgcgtccgcggaggagggtccataacccagtccaatgatccgctctatgtagtcgatggatttccggtaagcaatattggcgatataccggcttcggaaatagaatctatcgatgtgttgaaagatgcgtcatctacggctatttacggtgcacgcggtgcaaacggtgtaatcctggttaccactaagagcgccaaggaaggtcagattaaggtaagctatgatggctatgtacaggtcaaaaatgtatcgaagacgcttgagacgctttctgctcaggagtatatccttcataactggagctatgccgcatccagaggaactgctaaccaggatgctgttgagaaatacttcggtctgggaagtaagtatggcaaccactatgccgactatgccaatgtgaaagcccatgactatacggatgatgtactgcgtaccgcactgtctcataaccacagtgtgaatgtttcgggcggtacagataaaacgaaagtgatatttacactcggctacgttaacgatgaaggaatcaagatcaattcggactacaaccgtctgaatgcttctttcaagattcggcagaaacttgccaagacactggacctggatgttgatttccgttatacggagtcaaatctgaatggacgtgagaatgtaacgaacggtaaaggttctaatgtgtcgggagcttatcgctatcgtcccattgacaatccgttgggtggtgtctcttattcggaagttgcctcaggcttcagtttcggtgtggctaatatcgacgacaagcacaatccggtagaattgatcaatgatatcacgaataaatcctattcccgttcattgagaggatcggcagctttgtcatgggagatcatcaaggggcttgtggcccgcagtgaattatcacttacccgcagttcatcgaagagtacttattatgagaacggatatacaaacggagataagcgtgccacccttaaccggggcatgggagatggattgcgttcggtgagcactttgaattataacttcaatatcggcaagaacaatgtattctcggcattgctgggtaatgaagtcctgaagtcggattccgaatcgtcgcaaatcacgggccgtggctatccttctacatttgattatgacaccacgatgggattgatccatacggcaaccacctctttctctgcaaccaattcttatagcgtgcctgcccgtacggtttccttcttcggacgtttgagctacactttcatggaccgttatctgttcaccggtacgttccgtgccgatggctcttctaagtttgcgccggataatcgttggggatactttcccgcaggtgctttcgcatggcgcctttcggaagaacctttcatgaacggcacaaaagattggctttccaatctgaagcttcgtttgtcctatggtacttcgggcagtgacaatattagttccaatctgtggcgtgaaacctggtcgagccttggttcgggcagcaatcatacccctatcaacggtgaactcggttcattctatcgtccggacggtttgctggctaactctaagctgaaatgggaaactactatttcgcgcaacttcggtattgactttggattcctgaacaaccgtgttaacggtagtctggaagtatactggaatactacaaaagacttgttgatggccgtacctgtggataacactaccggatactcttaccagttccagaacttcggtaaaacatccaatcgtggtattgagctttcggtgaatgtagatgtgataaacaaaggtgatttccgtttcaacgtaggtgccatctataactacaaccgcaataaactggatgaactgcctaatgccgaccagtatctctattcttcatactggggttcttcctctctggttcctaccaacgactatatgtttgtggaagggaaagcgatcggcctggtacgtggctttatcagcgaaggatattataccgtggatgatttcaattacaccaatggccagtacgttctgaaagaaggtgtacccgatattacgaaagccttgaccgctacatacatgcacccttacgatctgcctgccggacagactgcattccccggagctgccaaattccgtgatgtggatgaaagtggtacggtagacctggatgatgctacttgcttgggcgaagtgatgcctcgtcatacgggaagcttccaactgaatttcaactataagaactttgatctttctactaatttcaactggacagcaggcggtaaggtatataacgtggctgctatgatcaatgcatccggtcaggagtttgatggaatcggtgcacaacgtgcatcctgggtggccgatgctttcaaggtttacaatgtgaatgctgccggtgacttgtatgccgttaccaatcccgatgagttgagagctttgaatgcgaatgccaaatatcatttaccctatcatcagagtggtataacttcatcggaatggttggagaatggttcctaccttcgtttgcagacgctgacgctcggatatacattgcccaagaactggttgactaaagtacatgtggataagatacgcctgtatcttactgcaaccaatctcttcaccattaccggttattcgggcatagatcctgaagtgaatgccaatcctacggggcaaagcggattctacagtgacctgagaattttcccgacgctcaacatggacttcggaacttacccgcgtgcacgcacattcactttcggtgctaacataactttctaaatagtaattgtaaaataacagagaaacagatatgaaaaagatattgaatataactctcgcagcagctttcgcatgtgcgatgaccggctgccaggacttcctcgacacttcgtctccgagtgtagtagaccgcgattttgtcttctcaaatgaagagtctgcacgtggtgcattgtattatggttatgaaaccctccgtgcaaacaggagtgtgcataatgtcggattcttctggcatccggtttggggatcggatattgaagactctcaggacatttacgatgaaggtagcgccggaatctgtgaaaaatggtattatccgggtggtacgggtaactataacattaactcgggagaaggaaccgaagtatttaccaagctttacgaaacgatatccgtggccaattccctgatatccagttttgaggcgcttgataacttccagtcgatcatgaccggagaacctaataatctttcggatatctacggacaggctgtggctctgcgtgctacgtgctactgggaattgtgccgctggtatggcgatgtgccccatgcactgaatgccggtgagcaggcaaaaggactgacttcccgttatgccatttatgactatcatatccggaaactcagggaggtagagcctcatatgtatcgtccgggtgaaggcagtacgagagcggatgtcatgaatcgtacatatgttcagggacttataggacgtctttgcatgtataatggtggttatgcaacccgccgcacagacctgggtgcagacttctatgtggatggtgacggaaaggtgcttactttcgacgattggagtgtggaaaagaacggtgccatttatggacgccgcagcgattggaaagatttgtatgccatagccaaagaatatcttcaggcaatctatatgaatcccggttcggtggtattgcgtacaacggatccccgttccacaggtaagaatggacaggagtataataatccttatcagtatatgttccagcagatgcatgccgccgataatataacattggctgatgaatctatctacgaactccctcatgaatacaatggcggatcttcccgtccggcttatattggtcgtccttcgtcgggtggtgacggtcaggcaccttgcgtggcttgcggacaagatcgtattcaggcacatttctactacggttggttcgataataacgacttgcgtcgtgacgcttctgttgctgtaacagggagcacaggtggtggtcaggagttgatgcagtcattcgaccgcagtgcatggggtaaaggatgcggcccgggtaccaataagtgggactggaaccggatgactgcgcctgatacgaaaacttatggtaattccggtatcaatttctcttatatgcgtatttccgatgcttacctgatgttggctgaagtgtgtgcggcattgggcgatgaaggcagcgccaagacgtatcttgccatcgtccataaccgggcgttccccggcaacaacgacccgaactttgaaaaatatatatcggattgcggctctgtgtataatgcagtgcttaaagaacgtgctctggaattcagtggcgaaggcgtgcgtcgttttgacattatccgcaccggtattcttccggaagttgccgttgaaaacagaaaggtaatgtcggctatcattgagggcatacgtcaggatggttactacacgtttaagaatggcaatcagatacctgcctatatctggacgaagatggtcgatgctaaatccgagtatggatatagactgacatcacaaactccggctgacaagcaagatgatccggtattgttcccgggatggcgcggacagcatgatgattggggaagtctggttcctgcttatgcaggagtgacgatgaccaacgttgcaatcaaaggcttgtttaagtatatcgaaccgggttctgccgaagcgctggctttggaagctgatggatatgtacagactccatgggctattgatatgttgaaatatgaggattcttacgcgaagaaactcttcgccggttatacggatgccgattatgcggcaaagaatccgcccatccatttattgccgaatatttatcaggtattgctgaattcgggaattacgaatggttatggttttaagcagcagtaatatggtaagaagatgtattctttgcatgatgttagggttggctacttcggtagccgccctttctcagcatttatccggttacgaactggaaagagagatgcctgttttcctggatcaactgaaagcagaattgacttaccccatggcttggggaaatagtccggttaagaattttaagaagtggcgcaaacaggcgcgcaatgctgtgctggatgccatgcttgcccctccgcctcgcactaccgactaccggactgaggtcgtagccgaagagcagcggaatgggtataaagcccggaagttacgtttcaatctgaccggttattcccgtgtgaacgcctatatgctggtgcccgatggtgaaggtcccttcccggcggtagtgcttttgcatgaccatggaggtcattatacgattggtaaggagaagatgatccgtcccttcggagtgtctcccgaagtcctggctgatgccgatgcctgggctaaacaatgctacggtgggcaatatgtaggcgattatctggctgcacatggatatgtagttatttctattgatgctctgttctggggagaacgcggacggaaagaaggagttgacggtgacaaacacatggctgtggcaggtaacttcatgatgctgggacgcagttggagtgctttcatgaactacgaagacatgtacaccactgactttctggctacgttgcccgaagtcgactccaaacgtatcggttgcatgggcttttcgatgggagcttaccgtgcctggatgctttcggcactctctgataaggtgaaagccggagctgccgtctgctggatggtgactacggactgtcagttctcatgggagtatggaaaagaaaggggaggttttgccaatatgttgccgggtatccgccgttatctggattatccgcatatcgcgtccattgcctgtcctaaaccgatgttttttctgaacggggaacatgacaagctctttcctccggtaggagtgaatgccgcctttgcagaaatgcggaaagtatgggaaagccgttcggcaggcgacaaactggttacggaactgtgggatatgccgcatgattgcggagtgaaagtccaggaagccgtgctatccttcttgaataagagtttatgatgggatagcggcaaaatataggcatagcgatcaatgtaactatttgtgtgataaagcattcagtgttccactaagatctgtcgtagtggaacacgcgttcagtcgtactgggaaatggtttcagtcgtagtgggaaatggtttcagtcgtagtgggaaataccttcactcgtagtgggaacccggcacttagttttgctttcggctttccttgtattcagtcggtgtcattccatattgctgcttgaagcacttgctgaagtaatgcgagtcattcagtcccaccatgtaggcaatctgtgccatgttatactcctctgtctctatgagttgagctgcccgcttcatacgtatttctttcaggaactcaacgggagataaaccggtcagtgtcttcagtttcttgaagaatacggaacggctcatgtttacttcgccggcaatgtcttccactgtaaggtcaccgttatccagatgcttctctatggtttccatcactttatccataaatttccggtcgttgggcgaaagggccggagtggtagtttcctttttccctgccagaggttgttcggtggatgcaggcaacagactggcacaatacaatgcctgtaacttcttgcgctgttcaagcagattgaaaatacgtgccttcaggtaggcagcgctgaagggctttgtgatgtaatcgtccgctcccagcttcatgccttctatcttgctttcgatggtcgacttagccgtcagcataacgatgggaatatggcttgtggtcatctcttcccgcagttcgcgcaccatttctataccatctttttcgggcatcataacgtcgctgatgatgatatccggcatatacaatttgctcttttccagtccgatgttaccattttcagcttctatcacattgaagtactgggcaaagatggtccttatgaagaagcgtaattcctgattatcttccactatcaggatagtttctttttcactgttcaggttctcctcttcgtttccggtgagagaagagaactgatttccggtgtatgccggtgaggtatcacttaccacgtagtcggacaggatgaattcaacggtttcgtcgaagtgttcttttcctttctgtaatctgatgctgaagcaactcccttctccaagtttgctccggatgctgatggagccgtggtgcatatcgatcaattctttcaccagtgaaaggccgataccggtgctggcctggttgaagaggttcttatccactaaattctcgaagcggacgaacagggacttttgtttattctctgcaatccctattccctggtcctccacagcaagaatcacatccttttcttcttcctgcaccaccactttgatctgcttcccttggggagtatatttgaaagcattcgataacaggttgaacaatatcttttccaacttgtcggagtccgcccatatcttgaggctggagactttcgtatccatactgaaatcaatctggtgttcatcggcaaggctgttgaaactttccataatgtggcggatgaaagggatcaggtcaatctgttgcaccctcatcttcatcttcttgttctgtatcttgcggaagtccaggatctgattgacaagcctcaacatccggttcgtgtttcgctccaccagcaccaactgttcccgttcctcatcattcaacttgccatgttgcaggacttgctctacgggaccggcaatcagcgtcaacggtgtacgtagttcgtgcgatatatttgtgaagaaacgtaactttatatctgaaatctcctgttcaacagatactttatgcttcagccggaagatggtgaagagaatataggtggctgtaaaaatgaccaataagatgaatagtacgtacagggaatatgcccacggtgtctcccagaaagagggaagtatgttgatgtccagtgtacgcgtattctccacccagatgccgtcactgtttgtagagcggactttcagggtgtaatgccctttcggaaggttggtgtaagtggcggttcgctggttgccaatattgttccagttgttttcgaagccttccagtttgtaggaataggagatgttgccgggatacttcatatccagggcggcaaactggatgctgaatccattcttatcgtgaggcagggtcaggaggttcgtatcatcgatgtgggtggtcagtatgccaccttcttcgggagtcaccgtcttctcggcctgttgcaggcgggtgaagatgatgggaggaacgtatgtacttgtatggatggaatccggaaagaagtataggacacctttcacggtgttgaacatcagataatcggatgcagttcgcagagccgccccttcattgaaactaattcgtagggggaaggctctggaggggtagtttattattttatccgtggaaggaataaacttgcatagttctttctctgtagcgcaccacagatttccgtgtgggtcttcttcgatggatagcaatacgtccgaaggaagcccgtttttcatggtgtatgcctgaaagcgggcttcagcaccctccagtgagagtagcttattgagtccgcctccgaaggtggccacgtacatttcgcctttccgggtgaaatatatgttgtgcacgtcgttattgctgaggctgttggcgtttcccgaaatacggcaataacgttggaattctatctcttccggttctttgaaattgcccttgcacatcagtaatcctgtggcgctgcctatccatatattccctttggtgtcggaggtgatgaaacgcgtacggtaacattggctgataggatagttctttagccggttccggtagttgatgaaacggtccgcttctttgtctgttccccgttccaggtagttgattcctccttcgaatgtggcaatccatatccgttgctgccggtcttcatgcagactgtatatctcgttaccgctcagactgtatacatcgtttgcgtcggcgctgtactgaacgagatgataagtcagaggctttccttgaggcctggcggcgaatagtccgttgcctttggtgcctatccagatggtgccttcgtgatcttgtatgatagaatagccgattcctaacttgtccgtactgtaaggggagatagtccctgaggatgtgaggttgcccacatagcgccattggctgtcgtagacacgtataactttgtctttattgcccgtccatatatacccgttgcggtcctgataaacggcacggacgttgcttcccgggaattccgtgtcatccggggcagcggtaagtaaatggaaatgattggtattgaaagagatcttctccaagccgtttccgtatgaaccgagccataaattaccttgtttatcagtaaagacattggtcaccttattgtcagcgctccagcccgattgcagggccggattgtaaaacggacgtatccggttgttcttacggtcgtaccaggcaagtcctcctcccgaaggatgtacccataaagagccgttaacatcctcgtatatatacatttccggtcgggaatcgacgatatctttgccgtacttgtcttgcagaatgaagtgatcgaactgctcgttttcaggattgaagtgcgtcactcctttggtgttgaggcgtatccatgcttcaccgttggtatcgatatagactgctttaatctggttgtcctttaatgaaggataattccgggtattatagtgacgatggtttccggaactttgttcatacacaaagaacccgtcgctggctgtgccaatgaatagcttgtcctttttgagttgtcggatggttttgatggacgagccggtggggaactcttgccttacaaactggccggtgtccggattatattcgtatacgcatccctgtttggaagtaaagtagatggtatggttgttttctaatgcatcgtaaaaaggctgtttgtccttttccggaggagcgacgaagtaagaagaaagtttctcttcattcccgttacgagtcaggcggtataatccgttctcggtaagaatccattggttctcccggctgtcctgaaagatagacttgataggctctgagtatgaaatctgatgggatttgaagaagtctgtggctttcatttcatgtgtttccgggtgagtggaaatatgaatcaattcattttgtacggtaattatccatacgtctccacacggaagcacatacatgtccaatgacaggtagttgtcgtaagggatagcctggaaccgttcaagtcgcggattgaaacgatagacctggtgattgtagctttgtacccagatatatccgtatctgtcttctttaatattgtccagacggttattgctcaatccgatgctgtcgcccggatgggctttatagttgttaaatgtatatccgtcaaatttgtagagaccgtcccaggtagcgaaccacatcactcctttgtcatcttgcagaatgctcatgatggtattctgcgagagtccgtcttctgaggtatattgtgtaaaggtatgtggtaattgtccgaagcagaagccggtggcaattacgcagaggattagaaatattccgattcttctcatggttagtgtattactggatacgctttatttcagccatttattgaaaaactccaaagtctctttctgcatttccttattgaagaagtgtttctcttcccatatcttagtaaccaggcggtcggcagccttctggctctgccagacagcctgcatggtgtcataagcgtctttaacaccttctaccggaaacaacttgtcccggctcccattgaaaaacagggtgggtttcggacaggcgatgcttgctgtatgcggataatccagatagcggcgtaggttcggtatcagcatggaataggctgatccgcctttgttttgattgttggtgagtgtcatcaggtgttcggtggtgttcatccagcaaatggaggcggagacttttatgcagtcggtgatggcggagagcatccaggaacggtaggctcccatggaaaaacctacgcatcctactttatctttatccacaaatggcagtgaggccacgaactccgcacttcgaacatcatccatattgatgaacgctccccatgaactccccatttgcaggaagttggaagctaacgcttgctgtccgtcatagttcaccccttcctttctgccacgttcaccccagaacaaggcatcgatggaaagtaccacataaccgtgttcggcaaaatagtctcctgtatattggccgtcgtagcaacctgctgcccaattgtcggcgtccgctatgatttcagcgcttacaccgaacgggcgtaccattttttccttaccgatggagaagtgcgcaccatgatcgtgcagcatgacgactgccggaaagggaccgtcaccatccggtactaacaggtaggcgggaatacgacaccactccgatacgttaaatagtattttttgagccttgtatccgttgcgctgttcggtagcgattaccgtcatggcataatcggcaggggcaggaggtaaaatctgcatacagtccaatagggtttcccgtgcctgggcacgccatttatcaaacttgcggataggggagtttccccacgctgccgggtaagtgagctgttgtttcaattgctcatagaaaaccggcatgtttttgacaacactatatgcggtggtatcagtttgtgcaatcatactgagatgtccggagagaacaatcaagaaaatggttgtaatgcgtttcatggtcagtggttgttaaaatctaaacaaagatacatgatttttctatgaaatacgtatctttaccgcatagaataagcctgttatgatgaaaaaaatcttatatctgatccttgggttgataggtgtgttgtcagtaaaagcgcagccggattgttttttcacccattattcgtctgaagacggactttctcaaaatacagtaatgagcatcctgcaagaccgtaagggaaatatctggcttgctacctgggatggcattaataagttcaatggttattcatttaaaacgtataaggcacgtcttgataatcgtatagtgttgagtcataatcgtatagatcatatgctggaagacaagtatggcttcctttggctacaaacctatgacaattacgcctatcgctttgatccccgtacggaaacgtttgagcgtgtaccgggtgatgatgaagaggggggcacagccaatataacgaatatcaaagtccttccggggggggcggtatggttgctgacggagactgatggggtgatccgggtggcaactgatccacaggattatagcctgacctcccaatattattctactcaatcgggacagttttccgcctcacgtgtgtttcaggtatatgaggaccgggcaggtaatgaatggatattgtctgataacggattagggatgttggcacccggagagaaatcaccggtcttttattttgcagagacagcagagcgggagaagaaaggcgggcaagctttttattcctgtttggagcatggtcccgaaatctatttcggatcggataacgggcgggtatggcgttatcagaaggagagcgggcagttcttgttgctgagcctgccggtttcatcccatattgtgtcaatcaatcatatagatggcaatgagatcatactgaccacttcaaaagacggattctttacttataagtgtgatacaaagaagacagagcacttccctgcctcccgttttcctgacgcaccgattcatggtacttatgtggataaggcatcggaagtatggttcgagcaacatgttccgggtacagtggtacactttaatccgcgtacacaggtcttaaagcgtgaagtaatagctgtggaacctaccagtacggaccgttctcgtccggctttccatgcgcatgaagatatcaacggcgtactttgggtacatccgtatggcggcggtttttcatattttgaccgtgaaagtaatagtctgcatccgttctataatgagctgtcagggcatgactggcgcttttccaataaaatacatactgccttttccgacaatcaggggaatctgtggatgtgcactcactctaagggattggagaaggtcactttccgtccgtctcagtttggcatcgtaacgccggtaccacacgattatgagtcattgagcaacgaagtacgtgccctttgcgaagatgctgaccagaatttatgggtaggcttgaaagatggtaaactacggatatatgataagaaccgtgtaaataagggctatctgaccgaaaacggtactgtgtcgcacagcggcactccgttgcgtggtaatgtttatttcatcttgcaggacagtaaacagaatttctggattgcaaccaaaggggatggcctggtgaaagctgaaaaacagagagatagctatcactataagctgacccgttatcagcatcaggaaggtgatatttatagtttgagtgacgacaatgtttactgtgtatacgaagataagcatggacgcatctggattgctacatttgcaggcggcatcaactatatggcgcacaatcagggtggtaaggagattttcgtgaaccatcgtaataacctgaaaggatatcctattgattattgtaacaaggcccgttttataacaggtgatgatcaggggcatatctggataggaactaccgtgggcgccttgatgatggatgcggacttcaagaatcccgaagatgtgaagttccgccatttcctgcgtgttccggacgatgagcatagcctaagcaataatgatgtgcattggattgtatctacccgggataaggaactctttattgcaacatttggcggcggactgaataagttggtatcgctggatgagagcggtaatgcctgtttcaagtcttatacggtacaggacggtctgccttcggatgtgttgctttccatacaggaggataaagccggtaatttatggctcagttcggaaaacggtatcagtaagtttattccttccgaagagaaatttgagaattatgccgataaggagatatttttccgggtacgtttcagtgaagcggcttcggaatatactgcttcgggtaatatacttttcggggcaagtacaggtattttctatttcaatcccgattccatcgggaagagtaattatatgccgccgatggttttctccaagttgctggtggcgaatgtggacgtggtgccgggacagggttccgtactgaaacagggattggatgataccaaagaattggtactgtcgcatcgggagaatattttcaccatacagtttgctgcactcgactattccgcaccttccgaaatacagtatgcttatatcctggaaggttttgaaaaggcctggaactatgtaggtaaacagcgtgtagctacttataccaacttaccaaaagggcattatgtctttaaagtctgttctaccaacagtgacggtatatggactgaaaacacgcgtacattggacattgagatactaccttccttctgggaaactccgtttgcttatttcctgtatgtgcttttcttcatcatgattattgtagcggcggtgtatatcttgttcactatttatcgtttgaagcatgaggtgtccgtcgagcaacaaatgacggatatgaaactgcgtttctttaccgatatctctcatgaactgcgcactccgctgactttgatttcagggcctgtggaatatatactggggaataccaaacttccggatgatgcgcgtgaacagttacaggtggtagaacggaatacgaaccgcatgttgaggcttatcaaccagatactggacttccggaagatacagaaccggaaaatgaagatgcaggttcaacgtatggatgtggtggcttttactcgcaagatcatggcgaacttcgagtctgttgccgaagaacatcagatagacttcctgtttgaaacggagaaggaagaactgtatctttgggtagatgcggataaatttgagaagattgtgttcaatctgctttccaatgcttttaaatacactccgaatggaaagatgattacggtgcttgtgcgcgaagatgagaaatcagtttccgtaagtgtggaagatcagggaataggtattgcagataataagaaaaagtcgctgtttgtccgttttgagaatctggtagaccgcaatctgttcaatcagtccagcaccggtatcggtttgtcattggtgaaggaattggtagaaatgcataaggcgaccattaccgttgatagtaagttaggagagggaagctgctttaaggtggacttcctgaaaggtaaagaacactatgatgaatcggtggaattcttgcaagatgatgctacggtgggtatgggaatcgcagaacaggtgaccgatattgttagtgaaataccggattcttctgaagaagagaatatagaggaggaatcggaagagagtatggacgccaaagggactatgttgcttgtggaagataattcggaactccgtttgttcctgcgtagcatctttgcttccgagtacagaatcgtggaagcagtggatggtatgcaaggttggagtaaagctttgaaattccttccggatatcattattagtgatgtaatgatgcccggaaaagatggcatcaccatgacgcgtgaactgcgtgccgatatgaccaccagtcatattcccattgtattgttgacggccaagacttccattgaaagcaaattggaggggttggagtatggagcggacgattacatcacgaagccgttcagtgccacttatctgaaagcacgcgtaaagaatctgctcacacagcgccgaaagttacagggtatctatcgggataacctgatgacgggaaatgcaacggctgactcaacggaagaaaccgtagaagagcaaggaccggaaatgtctccgaacgatcgtaagtttatggacaaactggtggaactgatggagaagaatatggataatggagaattggtagtagacgacttggtgcaggaactggcagtcagccgttcagtcttctttaagaagctgaagacactgacgggtttggcacctattgagtttattaaggaaatgcgtatcaagcgtgctgtgcaattcattgaaactggagaatattccatgactcagatctcttatatggtgggtattaatgatccccgttatttcagcaaatgcttcaaacagaagatggggatgactccaactgagtatcgggataagggaatgaataagatcaattcgtcaaaaaatacatgaattcatcaaaacggacatctttgtagtcttgtataaggctgataaacaattgattgctaaataatgcagaaaatactgatttatggagttacattttgtattttctatatacttttgcccgtgtcgtaaaggtaagaagatgataattacttgaattcaagaaattatgactggttagggttaagaggatgtctccagggacatcctcttgtttttattaaaactatctattgcaatgcttctatatacttccgggttccgtctgttaggatgagtacccagtcattgccgtttgaatgaccaccttcaggctggaacgtttctacttttgaactaaactcaccgatataagatagctctgcattgcgtggtgaataccaccaagcctttttagtctttccatgaatcttgctgaggtctattttcatggggcgtccggtatagttgtacactaacatatagtcgttgccacgtgttgcaatgagacgttcatactttgtgccgttattgccggctatgcaactctggtcggctactctttcaaagaagggaaaagcaagtatcagttttttcaaatattgcatctggttgaatccgggatctttcagggcttcataccataatttggtagcaccgtaggctggattaactcccggctttaggaattgcatgatagagctatgaccgtacgtatgaccgaatgaaccggcaaaaaccgaccagtaagcatatctgcgtacatcgttgtctttccagaaaccttccttagggtcgtgaagtccttggggaatggcttcataagacggctctccatcaataaccggacgtagtggcttttgagcaaggctatgttccacatatcgccagttgtcttcttctgtgccttgtggtaacagtgtctttttgtcatctttgctttgtccgtagcggcggtgtccactttggaacatattgaaatccagccagggggcatcgttgaaccattctgccgagagtgtccttccgaagggatggaaagtcatgagatggttcttatcaatggatttaatggtgttggcaagcatgttccagacttcggttttgatgtttccatagatatctccgccaatcatccagatgatgttggggcgatctttgtaacggttggcgagaaaagtaccataagccttggcttcttccacattcatttttccactttttaccagcccgccccagatgcagaccatgccgatataaatccctctgcgggcggcggcatcgatgataaagtccatatgatcccaatatccatatatacccggtcggttgatattggagaaatcaaatccatccggcatagacgattgtccataaaagttcatggcaggtactccgttgatggtttgtacctgtactacgttgaagcctgcttgtttacattgttcaagatagtattccgcttcatctcggttcaacctttcgggaagcagccaaccggtatctccgagccagaagaagggagagccattcgtatgctgaaggtaacgggagctgctggatatttgcaaggctccatttttccaagggaggttgtgtgattgtgaaaacacctgataaaaaaagcaggtaaaacatagatagaatagtattctcttcatgctattatttttttagaatatgtatttatttaagcaattcccaacgcttggcccagtcttgcagaacatcttttctccatttggataccgttttacttccctgccattttccttcaaacaggtttgcgtcatttcggtctgtataccaataatctcctaatttatagtcatcggcatcaatctttccgggccatgtgttatttacgacgaactctccggtttgttccggaaattccggaatatcagaggtaatcttgtaggttaggactgcggtagatttaggagcatatctgacggcatattcaccattacccagatagaaaccctcccagtcctgaccatctgttgtcatggtgaaacaggttgagtcagcggggatattcatttccggtccctttatgcggaattcaatgatggcatataccggaaccgtatctttcagggtagtactccggttgaaaatgactcttgggctatgagtgaatttctcgaaactccctccccagctttctttctgaggattattcggatcaccatccatcatgtaaagtagtgatggggtatctcccatcttgacttttccatcgtaatattttatatagtcttttcccagatgtccggctccacggatacattcatcgtaatagtctttgttgaatttaccaggttgtttgtcattggttatgaatccacgataggaagcattggcctcgatgaaccaaaggttggggaaattctcgacaatgtatacatagctattggtactccattttttattcggtccgccaatccagtatactcttattttattttgaatgtccggagcatcatgtagagcttgtgctaagtcatcgagtccgccccatacgagtatccataagggccgggtactttcttttctggcacatttaatgatccaatcagaaccctctgtggcagtagtataacctttgaatggggctgctccttgtcttccttgtttgcagatggcgcgtaaggcatccggtgacgggaagccctttatgtgttttttcaacttgggcagatctttttcgtataggtctatcatgtccagaagattctgtttacttccgtgtccataggagggagaagatactaatccttctgtttcgaacatctcactgtacataaggaagtgtgccattgattgattgtcgtccggatctgtgccacctatgtccgtactgataagaatgcgaggcttaaccggaataggctgttgccccataacagttatagaggcagttaaaatagagaagactaaaaagagtttcttcatgatatagattcttttgattttaaatgttccgtcaatagtggtttgtacttatgtgtatgcaaaaatagaagtttatagctataaagaggaggaaatattgttccttttggagtaaatgatgataataatggtatagggaggcggggttaaaatggtaaaagaaaaagaggatacgcactttgtatagtgacgcaccctcttttactttaaggattcaaatattttaataccaacggggatcaccgaatccgtaactctggaagagttcatcagtgatagtgaaatcggcattgtcaggatcggcaaatggattcttatcaagaatatttccttctgtatcgaaacatgttaaattggtctgagtattaccttcggcttgtgaagtcaagttcttacagttatagtaatagttgtttgaatagctgggtactcctacggaagttgaattggcaaaaccgcgagtattatcgaagttggctacaacattattggtaaaggtattggtattgccggggaaccgcagatagaagaaacggtaattggcgttaccattacctacattgtagaatgtacatttatcgatagaagttatcatacttgcactcaccttgcttgaagcatcgtcagcacgcaggatatcacgcttagcagaacagctatagaatgtagagcttgagatgataagattgttccaaccaccgctacggctatcgataaagtcaccgccggaacattcgatatcatgaatgatggagttttctatcttgattgtattggctacagctgcaacgttgatgtagataagtcctttcacgtaatttcttatttcacttccgctgatgataagatcgccaaatcctccggctgttttgtattcaatagcctgacttccatctgtaccggtgccatccatcactacttgatagagatagagtgaagaaccgttgttgatatgaatacaagtattaatcaccggcaggttaccggagttctgagcggcaatggtcacattattgttgatttgcagcttggctgatgtcaatgtatattcaccggctgcaagggcaaacttactacctgctgctgcgtcctgaatagcagtcacccagtcatctgtcggagtgagttggatagcgtcacgtaaatccaaattagtagtaaaggtagaataaccacgggttttctcgcctaacttcaacgtggctctataacttgtctccggttcaagtcctgtgacggtagcagatccggaagagatgtctgttgcagttagagtgtaagtcaccgtcttagctgaagaatttgcagcgctaggagtgcatacgatagcatcagcctgaatgcccggcgtccatgttactgtaacggctgtgctttggatgtcaccggcctttactttgttcatattttgctcagggttggtagtacgcatgatctcgatccatttagatgtgcgtgatgagttgtcttcatcaatggctcttacacgaatgtaataggctgtttcaccaatcagattagtcaaagtagtctgagtgagagtggtggcatctgacacatccggtgtgcgctgaccgtagtcaggagtatcggcataagcttcaatttcgtaagaggaagctcctttcatttcatcccaactaacaatgatatttacgtcctgagagatgcgtgcagtaatattggtaggcgacaatatgcggtcaagaaccaaatcattaagatcatccggatcactgcatgatgttactgtaacacagcctatgcaaatggcagctaatgtacaaattgataatatatattttttcatcgttgtttaatcatttagttaattaataccactcgtaatttgcaagattaggattatcgttcaaattgacgttgaagattggccaatattgatatttatccggatcgcgcacgtagagatagtcaataacatcatctaatgcagtatccttaatccaggttgaggcttcgccactgctattggtaaattcggtatagccttccggatcaagattcagttcgccatagttcaaaccatagaaattcagtttggcattgggctcggtagttgctatgccgttacgggtccaggtgtatgcactcattttataatatacatgacctgagagctggctatagggatgcttggagtcatagtctgtcagatttacgatagcgttcatcttatcttttgtttcatccatcttgcttttcagcattccccaacggataaggtcagccttacggatcagttctcctgcaaattcaagagctctttcgtcaacaatggcttggaacattttctctttgctttgagatgcctccgcaacataagctgtaacttctgtagcgcggtcggtagtagaaaaggcgcggttacgaatcttggtcagataaggagcggcagcagcaggaccattgagctcgttctctaattcagcacgcatcaatacaatatcggcatagcgcatatagtgcttgttgataccgtcatcgtttccggaaggaatcatacggtttgtccattcataacgtaactttccgaaactccagctcttgaaggactgaagagtttgcacgccctttgtccactggaatgggcaacaagtcacatcacggcgtaaatctttcactgaatagtcgaagtatagagtaggtgtaggccctacctggctaccttgaagcattgttgtcatattatcggcagtagtgtgcttaatgccgaaggtatacatgatacgtccacgtgccgggttattgctgtaaccgatttcaaacaaagattcgctacctgcattgatgatatcaccagagataccattgttgttgaagatatcttcgaagtttgatttcaaagctacataattgccttcttggtccattacatccttacatgcctgtagtgcgataggataaagtttttctttgctgagttccgggtctgtgcttaggcggtttgcaccgtcaagacgttgagcataacctgctgcttgcagacaaacgcgagccaggaaaccttttacgaagactttgttcacgcgttccactgttttcgtggcatcaagttcgttaggccatgcacagagattttgtgcctcttgcagatcgataataagttgcttgtagatgacatcacggtcttcacgtcctgaatacatattatcggcattcaatgaagtcagacgggcaggaacatctccccacatattgataaggtccacgtagtgcagtgcacgtagggtaagagcttcgcccagcagttgcttcatatttgcatctgtcaggtctgcattttcccgaagaccttcaatagccagattggcgcgttcgatggcagcatatattttggcccaaagatcggtacctgtagtaacgttcatctggtcatttccgactccagcattgtatgttgccaaatcagcttttccgtctgctttgtctgaaccactgaagatttctatatccgtattgtatccataccaaatggcacgtgcacgatagttttgttctccaaattcttgatagatattagctatggttccttgagcatattcatagttactgaaaatgttcttgccatccagggatgaaggagaactttgatccaggaaatcgctgcatgaagacagcccacccagaaggacgacagctgctaaagatttaaataatatatttttcatttcttctttcgtttttaaaagttcaagttaacacctattacaaactggcgactctttgggtatgcagagtagtctactcccggagtaagagctgtcttgtttcgggtagaaacttcagggtcgaaacctgaataaccagtcagacagaatacattgtaacatgtagcgtagaagcgcaaattattaatgcctactttcttggttaaggccaatggtaaagtataacccagtgttaatgttgacaaacgtaagaaagaaccatcttcaatagcccaatcggtcaatacataactggtgtaaggtgaccacatagtggtattggcatttaaagcagctaattgtgcgggatcatttaccaggttaccgttagcatcgaggtttgtccaacgtttgccttcgcccataatgtcgagcatattacggtaataatattgataagacgaagtatattcaatcttgttggcattgtaaacgtcattaccaatgctataagtgaagtttgcactcaggtcgaagccatatacgcgacctgaaaggctgaaaccaccactggctttggggttggtgttaccaataacagtacggtctttagcatcaataacattatcgtcattcatgtttttcagtttcagagcacctgggcgaagatagctggtacctatcacacttgaattattaaccacaccttctttcaatacccatttttcaccagcggcgtagtaatcctcaaagtcgcttacttcataacgaccatcgcttatataaccataaatttcgccaaccgaatgaccgggcttaacgatgtagtcatcttgaatttgggttgaagcccatcccgaagatgctgagtattgtgttaatgagccaaggctctttactttattcttattgaaacccacattaccgctgaatgtcaatccataatttttcgtgttaatagcgttccaagtgagagagacctcgaaacctttgttttctgtctcaccgaggttgcggtattgatagtcataaccggaaccggaaactgggaatgcgatgagcaaatccttagtggtgttccaatagtattcgaaactaccggtcagtttgccgccgaacagagtgtaatccagacccatattacgggtaatggttgtttcccattttaagtcgggattagatgcataagatccgctttggcctgaagcaatgccgctagtccaataagagggaaattgattaagccaggtagtggaactagaagaccatatcggagaagtttggtcagaggggatattgttattacccgcagtaccataggagaaacgtaactttaaatcgtcaagccaattatgagtcttctccatgaaactttcagaagagatacgccatgctacggcagctgatgggaagtaaccccagcgattgtctttagagaacttggaagaaccgtcggcacggaaagtggcgctaaccagatacttgctttggtaatcgtagttcacacgaccaaaaaatgaaagcaggttatcgtcggcattagtgtatttgtttacgctataaggagtaccctgcgaagataaagcccaagcttgagcggcagtaaaactgataggaaagaagctcaaacggtcatcgttcaatgaacttttcttgttaagggtttcttcaccgaccaatacgttcagactgtggttcttattcttgatgatatttttaaaatcatagttcaccgtattggtgttacggaaagttttacgttgggtatcggcaaagtaagccattggatgaacgccttctgtatctacactgttagtgcgtgcattataggtagaagttccataatatttcttatcagtattgtaataccagtctaaaccgaattcacttttgaacttgaaattcttgaagacttcccatgagaagcttccattcatgttgaaagtctgacgattttgtttgcggtcagtatcatatactgatgtaattggatttgtcaactgaaagtcagggtcataactgtcactcaagtcggggaagttgaacatagggtaaatcattacattcttcatgcgggagtcagctgaagatacctcagacttgctttcattagcaccggcaccgtttacagtggtatttgcataacgcatcgaaaagtcaaggctaactttatcattcactttatgattgagttttaagctcaagttgtcacgtcggaaagaagaacccaacatgatggctttatcattcatgtgagcataacccatgttgaactttgtcttatctgaaccaccactaattgtcaggttgtggttgaaagtgtttcctgtacgtccgaacacttgatcctgccagtcattggtaggagcattttcataaaggtccgcatcttgccaattaccgaagaggctggtgaatttgctttcgttatctcttaacaacgcatattcacgctgccatttcacataatcggttgcactcagtgtattcaaggtcttggccatctttttccaagaatagtaggcgttataagatacgcttaacttgccttcttttccacttttagtagttaccaggattacaccatttgcaccacgagaaccgtagatagctgtagaagaggcatctttcagtacagtcatatcttcaatgtcagaagcaggaatatcactgatagactctaccgggaagccgtctacgatgaataatggagtattatcacctgtaatggagccaccaccacgcacacgaattttcatttctgcatcgggtgaaccttcagttgtagtaatctgtacaccggccattttaccttgcagtgcttctgttgcagaggctaccgggacagctgccagcacctcagaattgactgttgccacagagcctgtcaggtctttacgtttcacggaaccgtaaccgataaccacaacctcttccaaagcctgtgcatcgtcttccataactacttcaactttagttttgcctttcaggggtatttcctgagaagtcatacccacataagagaataccaatgtggaattggcgggaacactaagggagaaattaccatcaatatcggtaatagtaccgttgctggtattccctttctgtactacggaagcaccgataacggtttctcccgtcttgtctgtcacagtacctgttacggttacattttgcgctgatacgctaagcgatatcacggctactaaacagaatagtagcgcggcgcgcatgtttttcattttgttagacattctttgcatgttattaattaagtatgatttttttcgttatgtgtgttcgggcacactgttaattcgttgctgcaaatgtatagggatgtgaaaatatatatgtgtaatatctgtttttagggtggtattttttgttatttactgtctataatgtttttgtgagttatctaaatgatgttatataacagaaaagaggggagtttattgctcccctcttgacgttttaacatagtgacgactgacttttgccggtatccctatagttttggttactatttattcttattgatttcttgcggtcagaatgtattcgtttcctgcatttgtttcgatatcatacacataagtctgtgcatattccggtatgcaaaccggtgcattggcagcaatcagtggtttgcggatgctctgtgattgtaatagcgggttgtcagatacctcttggacacttggagtcaatttttccccattcagatacaaaggagtctgggtccgtatgcggagtgtaccgccaatattggaagtgataacggctgtttgtaattctccgttttcccacttcatctctttcactgtaaagccgccacggcaacggatacctttcaatgttccctgtttccatacgtcgggcaatgccggaagaagatggatagctccgtcatggctctgaacgaacatttcggcaataccggcagaacagccaaagttaccgtcaatctggaaaggcgggtgtgcatcgaacaggttcggataagtaccaccgttttgtcccttttcatcggtagtggggtgcaactgttcggttatcagtttataggcatggttaccatcgagcagacgcgcccacaggcacactttccaacccattgaccaaccggtagagtgatcgccacgacctattaaagacttcttggcggcttcaaacaggatgggagagttgtaggcactgatttgacgtcccggatacaaaccccagagatgagaaacatggcgatgacggtctttgggattatcccagtcgtgcatccattcctgtaactgtccccaacggcctacctgcataggggctaaattgttaactacagtctgtaaactgtcggtgaaagcggtgttttcgttcattaaaccggcagcggcaatcgtattgtagaataaatcgtaaaccatctgattgtccatcgtggttccggcaactacaacaaatgtacgtttgccatttactacgggactgttttcaggagaataggagggggctactaccagccagttattctcgggttcacgcaccaggaaatcgaggtagaattcgcaggcaccacgcatcagggggtatacttcggctagatagtttttgtcgccggagaagaggtaacgatcccacagatgctggcagaaccaagcgttgcaagtgggccatactccgtagcttggtccgtctacggcaccggtgctacgccagatatccgtattgtgatgcaatgtccaaccgcgacaaccgtacatggcggcactttcgcgtccttgtatggctgcttcttttactaattgcaggaaaggttcgtgcatttcgggcagggaggtactttcggcaggccagtagttcatttctacattgatatcagtagtatatttgccatcccaaggagcacgtagctggtagttccagataccttgcagattggcggcttgtccgccgggctgtgaactgcatatcagcaggtagcgtccgaattggaagtataaagcagccatttgcggatcgaagcttgtactgaactctttgacgcgtacatctgtcggcttgtcggcttgagcattgcgccccaggtccagagatactcggttgaagtacttctgatatgcattgatatgggcggctttactcttcgcatagttcttattgacctgtttcaggtatttctgtgcagtgttgagtgcattgcccgatacatccttatagtttacgaagttggtgccgatggatacgtataatgtaacgctattggcatttttgacttgcagggtgctgtctgatgttgcttccagactgccaccattgttctctatgcgggtgagggcggtgaattccactttgccttcgataccttcgtggtcgttagcttttccgctcaactgtaattctttgcgggaggagatgctgcgtaccacattacttttataaggcgtggtatattttgcagtgaatgagatgctcttcttttgtgaagctgtcaagcggattaccaggacctgatcggggaaagaagtataggcttcacgggtataggttactccattggcggtgaagcgggtggtagctattgcctttgcaatgtccagatcacgataataatcgttgtaattgttgattccatcaaagtcaagatgcagggaacctacagtctgataaggcatcccgttggcggatggcgaacagatggtggggccgcaaagctcttgtgcctctttattcttgccctcaaagatgagttggcggatccgtggcaaagcgtctttggctttgggattggtgttgttgtaaggagaacctccccatacggtttcttcattcaattggaattgttcgtgtacagggtcgccaaagaccatggcgcctatacgtccgttgcctagtggcaaagcttctacccattgtgtggcgggtccatcgtaccataatttgagagcttcattttccagctgtgcctgcaagccactgcttatgcagattgcagcaaagcatgtcgataaccatttcttcatcattgtttttcattttttgtatttcagttgcaaggttaggcagttttcggcactttcaggggtaatatctatttaaaaaggagtaaaaatgatgcataccgtttgcctatttattggcaagaccttgctgatacggtggcaagattcaggcagtagaggctgaatttagtctttcaagacgctctcgataatctcctcagctttatccacaatgtagtcaggatggaaggtttccagttcagcgcgtgggcggaatccccaggtcactccgcaggaggttatatttgcatggatagctgtctgcatgtctacgccggagtctcctacatagagaacatcttctttggctgtctttgctatttgcaggatatcgtatacgacggtgggatcgggttttacgtttaccccttcacgttggccaaagacagcgatgaaacgaattgtaggaaaatagtgggcaattagtttctctgtagctgcttgatatttgttggaagcgactgcgagttggactcccttggtctgtagttcggttagaagttccgtgatgccggggtaggggcggcttttgtctgcattatgttggtcataatagggtacaaattcttttcgtatgcgcaggacattttcttccgtcttttctccttcgggcagagcacgctcaaaaagtttgttgataccatttccaaccatgaagttgtactcttgttcttcatgtgtgggatatcctaaggcggctaatgcatgattggtactttgtgccagatcggcaatggtgtttaggagggtaccgtctaaatcaaaaattacgagtttcttcatttttcttactttcttttctttatgaacgcaaatataaggcatttcgttcaaacaatctgtaatgagttgattcatttctgtagggttatgggttaaatgataattccaatattaagtaaatagagtatctcaattcccctcctccgtcggaggaggggtgcccaaagggcggggtggtaggtaaagcaaaaaatacctatgaaccatatcaataaggaattattttctcacctaccacctcccccttcgggtagaggttgtgtcaaaacgttggcacaaccttttttgatgatttacagtcctgctatatttccttttgtctacgccgcttttttctcattcatttggtaacaagttgctatattcccgttgtatcgagttataaatagcccaataaatatagatttagcaagtgtaatgaactcctttcctgcttttctcagtcttgcacacatctttttgatattaaaagctatggcaaagaaggcaaagtccattgtcaccttgtcttctcccacatgccggaacctcctgtatgccatgttgtatttcatttgtccgaaaacagcttccggttctatacaccgcctgcctctatgcctgattccttcttctgagagtaacctttcccgtgcctgccgtttatattggtttaaccggtggttgacttctataatacggttcccctgtgctttaaaacaacttccacgcaaaggacagccttcgcatctttgtgctttgtaccgggcactttcggtgatgtatccgctcgctgttttgtcacgtctggttcctatgcggttcatgtgttgccccatcgtacaaacgtaataatcctcccccgcattgtaatggagactttccgcatggaacgggttgggagtataacggggacgctgctctttatggaagtagttgtacttgacaaaggcctctatcccgttttcctgcatgaaccggtaattttcttccgagccgtaaccggagtctgccacaccgatacccggtaagcggttatagcggtgctggaaggagtggaagaaagggatcagggtcagcgtatcggtggggttgggaaacagccggaagtctatgatgaactggttttcagtgcctgtttgtaaattatacccgggcttggtctgcccgttcttcatggcgtcttctttcatacgcatgaatgtggcatcaggatcggtcttggaataggaattacgttctccaaggacttcaaggtgattgtcgtattccatcagcttgtcacgatacccttcaagttctctgacctgtttctttttttcacgcagagctttcttttgttccttgtcctgtgttgcaggctgttgttccagcacttctttgagttcatccactatattagagagcatggcgggagtcaactccacggatgtgtcttttacagagttctcctgcacaatggcttcatccacctgctccagaaggatgcgaatcttattcagcaaccttgtacggttcttttcgactgttttgcgccagacaaaagtatatttgttggccttggactcaatcttggtgccgtcgatatactctacgtcaagactgatgaaacccttgtcagctaggacaagaaccaactgcgtgaagacgttgtttatctcctcctttacacggttacggaaacggttgatggttatgaaatccggatgctcatgaccggcaagccagatataatggatatcacgcaaaagaagcttctctattttacggcaggaatagatattattcatgtaagcgtagataattaccttaagcatcattttaggatgataagctgagcgccccgcttctttataaagcttcttgaaattatcaagattaagattatcaacaactgcattgactatgcggacaggatcgtccgcagctatgttttcatcaattctttgtggaaaaagaacggtttggttgggaatgtaaggacgaaaatgtaactttgccataacgaaaaactttatgcctaaagttacaaaaattttgggtaataacaaagcccgggcttgagaaagtctgggctttgcgcataaaaagagggtgtgccagcattttgacacaacctcaattaagatagtattacttgaccatttggctcatttctttcccgttatgagcaaaaaagcccccggatgtcatacacttatacatccggaggctctgtattatagcgtaacttgcacgcttagaaaaatcttatttcttcgtaatgcggaaccagtctacatctgcccaaccaccgtcattggtagtaattgcaggacgggtacagaaagtacctaccttgacaccgatccattttccttctttagcctggaatgacttgccaagaggctggtacttctttccatcaagactatagctgaagtcacacataaccatcagatcatgtccgccttcactctttgaaatcttcttgttggcatcgctgctgaattttactttcagatagatggtgttgtctgtcaggtctaccgtaccgtttacttgttccggtgtacctttgtctgccttcaaacaggatacttgcgagagaaccagccctttgtccgtattctccaggatcagtccggcatagtccatacccatcactaccaatccggtacgttcgcctttgtatttatctaccggcttgaaagtcagttttatggtagcagtgaagttgggggccggagccttctgtaacagcagattggcaacatcgaacagattcttgtattctttcactaccgggtaagaatacaggcgtacgatgctttggtctcctgcgtagtatgcccacttctcgttgatattggcatgccactgccattgcggagacaaagtataaccgtcgaactcgtcactttcctgcggagtgcagatgggataggtcttacctacgttcggtttcttgtaagtcattacaggttcaccacaaccgtcaccgtctttgtcaataccgattacgggccagtcattcacccatttcatgggttgcagatgtaccagtcggccataagcgcctacatcctggaagtggaagaaccagtcttctccggttggggtatctacccatgcaccttggtgagggccattcacagggctattaccttgtgcaagcacggttttccattcgtacggtccgtatacattcttcgaacggagcactacctgccaacctgtaggtacaccacctgccggatggaagatgtagtaatatccgttacgtttgtagaattttggtccttcacaggtctggtgcgcctcatgtccgtcaaatacgatacgtgacggagtgatggccttggtagcttcagcattcagttcgcaaatggtgattacactcttcagctcggcacggctacctgcgtaggcatgtaccatatacactttgccgtcctcgtcccaaagcggacaagtgtcgatgatgcctttacccggtttcaccagtacaggctcagtccacggtcctttcggatctttggcttttaccatgaaagcaccttgatcgggatctccccagaagatgtaaaactcaccgttgtgatggcggatggcaggtgcccatacgcggttaccatgttcaggacgttcgggagtttctattggggacagagcgtaaggtacggcagcgccaatgatagtccagttcaccaaatctttggagtggagtatctgcaatccgggcaaacagttgaaactggaagatgtcatgtagtaatcatctcctacacggcaggcatccgggtcggaatagtctgcatagagtaccgggttcttgtacttaccgtttccttggtcggctacccatacctcggaaacataatttttctgctgtgctgccagcggaagggcgagcaacaggcatagactcatcaaggtctttcttgctttcatgatacgtttttagttattagtgattagttattagtgattggttacgaatgtcactttatcaccctatcacttcatcactttcacaactgccggatgttccagttcttctttccattcgcggatataggcgaaccatgcttcgggagttttatagccgaaggtttctttcatggaagtgaatgtgatattgtgggtgaaatatttgctgcctttggcaccgatggtgtacaggtaattagccttgtctttcacttcggcctttacgtacttttgcggaatgtatgtgcccagtcctacggtttctttagcgtacttcacggtgtcgtttacgggccagtccgttccccagcaacctatcaggcctttgtggtcggagtaagatacagagcctttgatgtctattacaccggtacagaagatttcgtctttcaacggttcttcaaagaaggtttccacaaacacatcgcggtgtccgccgtagagggtgtagcggttcgtcatgcgtagttccgaaccttgatattgccagtctgtcacttctatttcggcgatggtgcgtaccggaccgtaggcaatgatgcgctcggtaagcgtggatacaggttcaatatgagtggatttcttgccgtcccagcctttcagcgcacctaagccgcagctgccgcctaccaacaggacgtcgtcaccgaagccacgtgccagttgttcatcggtgggatagaactgtgattctttgatttcaaagcctttattgaatttgccatagatgtcgactgtttgcttcttgtcaaagtacaggcgatatgccaccagttcagattcgaaagccggaccgtggtgatgcatctgattgtagatgttactggttcccggaatggttaccgaatgtacggggacatgcttgcctcgcttgtcgcttaccagcatctcggcatatacacgggcaggataagtcttgtcgcttttggcggaagacagagtgacggtcactgttttcttgctcttggcaggcaggtcgatgacaaatgcaagttcatccggacggaggtcgccattcaggtcatccagttgtgaaggtatttcttcgctttcgttcatgactactgccgaacgtacccggaactgtggattgatttcactgagtttgattactaccggttcgtccgcttttgccttgttccaggtgttacttacttccaccttgaaactcttttgggtttcttgtgcttttgctgtgacagaaagaccgcacaataatagcaatactgtaaagatattcttcttcatggttttaaatatataactaatttgctacaaaagtagtgcaaacctaccgtaattccttttccattttgatataaatactgtcgcctttgtgagttattccttccaaccggcttcctcaaaagaggtgacttccacctgttggggatcgaggcaggcatacttgatgcgctgtctcctccaggtataaacaatgtgtacctttccgtctttatcctgaatgactgaggggtatgaatattggttgatcggcgaatcttccaataccacggccgctttccaatgcataccatcgtcactgattgctacattgatgggggtacgttctttccgttttcctttgatgtagcgatagtggttgtataccagcaagtgccgcccgtctttcagcgtgattccatcaatgccggaattgttgttgggcaagtcaatgaatgttaccggactccagctttctccgttgtcttcactccaggtggtagcaacggagccgttgttctgggtacggcataaagcttgtaactttccgtctttatgtgtcaggatggtgggctgtatcacttgtatggttttatgcttctgattactgaacttcacctgatctgtttccacaatttcggaagcagttataggaccaatctttcgccaggtctttccttcatcatcgctgatttcgaaatgaatccgccaaccgttctcatcttccgtactgctggggcagatcattcgcttgccgatccatacgggcttgtttttgatgggaccaaggaagccttcgggaagtgcccgggatttgctccatgtttttccaccgtcttttgaagtcacgacatgaccactccatccggctacgttcacacctattttataataaagctgtagttctcctttcggtgtttcggtcagtacgggattccagcaggcgtatttggttccgtccaatacaccgtccgcaaccatttgtggttctgtccagcctgtttttgttttgcggctagcccaaatgcaacaatcgggattcttctctttggttcccccgaaccaggctgccactattccgcgacgtccttctacaatagtagccgcatggctctccgggaaggaaggcttccgacagataaagtcatcctccagcaggccttttcttccttttccgtatgatatgttctttttaatctggaagttatacttccccgaacctatcttacaaactgtgtatctgttttcctggcggagtatttgtaaaccttcggattgcttcaatggctttccgttttcggtgagggcggaggtatccgcattgggcagccatatagtagccgtactattggcaggtacactgatttcccaggaatacccggtagttgtttgtgaccagttactcgttactttgccataaggtgtaatgtgagaagcacgaataaatcctacttcttccagttcgaaagcaggtttcatctggatttccttgaaaccgggagctgcattccggatacctgccagatgttgatagcaataggggaggaaatcgcccagtaacatgacgtggttaccgctgttcatggccggatcagctgtgtttccgttccataactcccagatggtggtagctccgttggctgccatgtatccccatccgggatatttggtatgggtagccagaacgtatgctacatctgtgtgtcccattcttacaagctcgcgcatcagccattgtacgccaataactccgcattgaatggtggcattgtaatagtctaccgttttatgaatgatttgccgggcaacggtttctttttccgtatccggtaccatgtcgaatgccagtgggagaaggttggctgttacggtattattgctgtaatattgtttttcctgattccagaaggtcttgttgaaaccttcttttacgtgttctgccagttcccgatattcctgaatatcctcagctaactgctggtggtgcagctgtccggtaatatccggagtgtggggcatatctaactgaagctgtgcaaactttatcatatattgcagcagcttgtagtaataggcggttgctatcagtttaccatcggtaatgcgggccgggtctttcgaatgtattaattcgggagattcgggcggaagacaccaatcgccgtaacggtcgcgggtgatgatatgcgattggttcatgaactctgtgcggatgtgctccatccattgcttcatggcgggataatgcttgcagatggttcccggatttccatattgttcatacagcatattactgatgaaaatgaaggttgacggccaggtcacgttgtctgtatagtagtaataataggccggcactacatcgggtatgcatccgtcttcccgttgcgcatcgcggatatcgtccatccacttggcataaagcggaccgttttccattaagaaactttcacctagtgcaccgttggtatggtcgcccagccagggctggcgttcatcacgctggggacaatcgagtggtattcctttataattaccacgaattccccagaaagcatttttcactaattggttcagaataggattgtcacattcaaatgttccggtgagaggcatgtcgtcatttacaacttcgcctgtaaagttggcaagggtaggagtacccggaaattcgctgacttctacatagcggaagccatgatatacaaagcggggagcccactcttcaatgccttctcctttcaggatataaaggtcggttactttggctgaccgtaagttggcggtgtatagttctccatccggttgcagggtttctgcaaagcgcaggcgtactgagtcgcccgcatttccttttacccggatgcgcagccagcctaccatgttctgtcccatgtcgaggatatagccattggccgatttatggatggtttggggattaatcttctccactaccttgatacccggtatggtttgtccgcgcagatatcccgaaggtatggaaacgcgttctgcctgcaaccagctactgtcgtcatagccggtttccgaccaacttcctaattctttccgggcatcgtattcctcaccgtcaaactcattgttgctgcggatgggaccgtcggctgtcagtttccagttcgtatctgtggcaatcgtttcccggctgccgtccgtatattctacgatcaggttcatccggacttttggatagccgaagttatggattttataagtacggtagttctggcgcatgaagtggtatcgtccgtttccgagcgtaatacctatggcattatccgcctgtgagcgaagcagacttgttacatcatagctgttgtaaagtacggttttccagtagtcggtaggagcgggagccagtacaaggtcaccgacccgttcgccgttgatgaggcattcgtaaactccgagtccgctgatgtgcagggttgcctcttttattgctttgctgagtttgaattctttgcgtacataccgggcggacaggcgtgaatacatggtttcgctatcccagggcataggtctgtccatgccaatccaacgtcctttccaacgtgtttctcccatcagtcccattccccagaaagcaggttcgctccaggcgctctcacctgtaccggttgttacctgtactttccaataatagcgctcgttgggttgtaaagagggaccttggtagcttatccaaatggacgcatcagagcgtacctcgcctgaatcccatacgtctgcccgattcttgcttagaagttccggggaggatgcaacgagcaggcggtaagttgtctgcatcacattgcgctgcccgctttggagccgccaactgaaacgcggttgaggggtatccagacctaaaggattagtcagttgttccgtgcgaaggtctgttatggaaagagtatcgctctgtgctgcttggataaacagacaacacagagcgatcagtatgattacttttttcttcatacaccagcggtattatataccttataaatcgatgttcaaagctttggctgccgaattattataagccttcccgtttactttcaggtctttggcttgcttcacctgcaatgctgtacctttggtatctatcttcacgttctctatagaaacattctcagcctggctgataacgataccttgcttggcgtccgtaacaactacatcctttacgtgtacattacggataggcatttcaggcagtccgttgaagaacatggcacggcctacgtttttgcaagtcacatttgtgatgtggatatcacggaaagcgggagttttttccgttacaggaggaacggatgatttcattctgccttccaggtcatcttccgtttcttcaccggcacctttaccgccatagaacaagtcgaacagcaaggcttcgtgcgggatatcaatcatattgatgttgtgaatatagataccttctactacaccgccacgtccgcgggtactcttgaagcgtaaacctacatccgtacccaggaaagtacagtcggttacatagacgttctttacgccacccgacatttcgctacctactacgaaaccaccgtggccgtgcaatacggtgttattttttacaatcacattctggcaaggttcgccgcgtctgcgaccgtcttcatcttttcccgatttgatacagatagcatcgtcaccggcatcgaatatattgttgacaatcaacgcgttcttgcaagattccaagtccagtgcatcaccattctgggagtaccaggggttgaaaactttcacattgtgaatcgtgatatgctcgcatgacaacgggtgcaggcaccagctgggagagttcttgaaagttacaccttccaataatacttttttactcttaacgatattcagcaatacgggacgcaaccacgggcggatttcattccattcctcgtccgtattaatgccttccgggttattgaaatctttagtagccatagcgcctttcagtgcaccggcagtgggataccagatgctaccggatgcatcgactacacctcctgaacttaccaggctactccattggcccgcagtcagtttgcctttttttaccggacgccagctatcacctgaaccatcgaatacaccatgtcccgtaatcgctatattctcagcattccatgctgaaataggagattggcaacggcgcgtatccaacccctcaaaagatgttttaataataggataagcctcgaaatcatctgtgaacaacaccagggcgttcatttcagtatatagattgacgttgctcagcagctcgatggggccggtcagccacaagccttcgggaataattactttaccgccacctttggcatttactgcctttatagcgtcgttgatagctttggtattcagtacgataccatctcctttagcgccaaaatctacaatattgactgtataatccggaaaagcgggttgttccactttcggcatattgaagggtaaattctcatagatactttcatctatataatttccgttttgggcatttaccgtactttgtgcaggtaacaacggaagggccagtgcaacaagcacccatagttttttgataaatgtgttcatccgtgatactatatttagttataagttattagttatcagttattcgttgttaactaacaggcttcttcaacttctcattttctttccttttttattatcctcccgcaagcggctctcccgagtggcctgcgaaagaaataataaatgattcatgttaacctaattctaaccttaaataaatattatgaaaaaacctcttaattaccggttgcaaatgtatcgggctttagctaaaaccatgtgcacaatttgttggtttaggtggattttttgtggttttgtccttttctttgcacacttacgggctttttatgcagaaagttcatatctttaaataagataggcggcatttcagcaaagcaaaaataagcaagcttattttgctatgcgttcaatttgcgctatctttgcagcctcaaaatagtaaacgtggtgataagatgcaagttgatgaggaagcgaacaataagagcaatttccttgttgatttgtttattagacacccgtcaactttaatattataggtatgagttacaatttgttgaaaggaaaaagaggcattattttcggtgctctgaatgagcagtccattgcctggaaagtagctgaaaaagcagtagaagaaggtgcaacgatcaccttatcaaacactccggtagcagttcgcatgggcgaagtttccgcactggcagataaattgaaatgtgaagttatccccgctgacgcaaccagcgtagaagatttggaaaatgtattcaaacgctccatggaagttttgggcggaccgattgactttgtgcttcactccattggtatgtctccgaatgttcgcaagaaacgtacatatgatgatttagattatgatatgctgggcaagacgctcgatatttccgcagtgtctttccataagatgatacaggctgccaaaaagctgaatgcaattgccgattacggttcaatccttgcattgagttatgtggctgcacaacgtacattctatggatacaatgatatggcagatgcaaaagctttgctggaatccattgcacgtagcttcggttatatctatggccgcgaacataatgtacgtgtcaataccatttcacagtctccgactatgactactgccggttccggtgtgaagggtatggataagctgttcgattttgccaaccgcatgtctccgctgggcaatgcttcagctgacgaatgtgctgattattgcatcgtaatgttctccgacctgacccgtaaggtaaccatgcagaacttattccatgacggtggtttctccagcgtgggtatgagcttgcgtgccatggctacttacgaaaaaggactggatgaatatatggatgagaatggaaacattatctatgggtaatatatagtgattaacggttagtgatgagtgattagtggctatgcagtataatggcatagcaaaatgaaccgctcatcactaatttttttcatttatcacttatcactaataacttatcacttatcaacgtggaaacagctctttatcttttgcccgtcactttgggtgatacaccgattgaaacggtgttgccttcttataataaggagatcatacttgggattagtcacttcatagtagaggatgtgcgttctgcacgccgctttctgaagaaggtggaccgggaaatagatattgatacactgactttttacccgctgaacaagcatacatcacctgaagatatttcgggatatctgaaaccgttgatggcgggattgtctatgggagtgatttccgaagccggctgtccggcagtcgctgacccgggagcggatgtagtggcgattgctcaacggaagaatctgaaagtagtgcccttggtgggaccttcttcaattattctttctgtcatggggtcaggctttaacgggcaaagttttgctttccacggttaccttcctattgagccgggcgagcgtgccaaaaaaataaggactctggagcagcgggtttatgccgaacaccagactcaactattcattgaaacaccttaccgtaataataaaatggtggaagacatcttgcaaaattgtcgtccgcaaaccaaactctgtattgctgcgaacattacgtgtgagggagaatatatcaaaaccaagacagtgaaggagtggcagggaaaagtgcccgatctttctaaaattccttgtatttttctcttgtacaaataacatctttcaggtgctcatattcgttttcaaagcagcagctgaaaaagttcttgcctaaattatgctctatttgctggaaagtccaaagctttccgtcttttacctgcttgtcccgtagaagattgtcgtcttctacatcaagaatgaaaagatagatcagccggttcgtcactttattctcaaagtgatacatgatattgaactgtaaatcttgtatcggtgcttgtggaaaagcttgtctcacaagccggacgatgccttgttccagggtttctccatataaaaggtaacattccatgggtatatcagtcttcccccggtcgagaatacagcgttgggggcgtggacgaagatacaacataccgttgtgagatacagcgatacggactaccggattgatatattcatttttcttgttgatagcatccactgccaggcttctgccgatcacatcccctttggtgttaacaatgggcacgaaagctgtgtgctccatcacttgattgaaatagaggattccgaactgattgaataatatactcagaataaatacagctggcggacaataccggaataaaacatctctggaagtttcacttaagggaccgggtaacagaattgtgatgaagactcccaggaaatgaagaaaagcgatgatgacaactacccgtgttgttacaatggcagactctgccccttgcgcaaaaagttgtttgcaacatttctgtgactgggaaatctggtgagcgagaaatcttttcctgttcaggaagataatgactacgggtatgagcgtactgatctccaatgtcagtggaaacatttcgcgggaactgcaatcaccgaagattaaagtggtcagactcaaaagcaagagcattccggtagtgcaataaagtaggaagttggggattcttgctccttttccccataaggtatataaactataaagggcccctacacctgcaccaatgtagatggaaatgtcttgggttataaattcgcacaatataatagatacgataaccgggataaatcccaaagacatattaaacttagatgatagaactcctctttttgacattgcaaactttattctgtcgttatctcatagataacaaataagtagagcaattggtttttacttcgtttcttttttgtaaaactgtacctgtttttcggcatgataagaagaacgcaccaaaggtgcactttctacctgatcgaatccttttgccagaccggtttctttgtaagaagcgaattgtgcgggagtaacgtattctgccacagggtaatgtttatgtgaaggttgcaagtactgtccgatggtcaggatttgacatcctgcacggtgcaagtcatccatcagttcttccacttcttccggagtttcgcctaatcctaccatgattcctgattttgctgtgattccgctgtcggctatctggcgtattacttccagacttgtttcgtagcgggctgcactacgtaccagtggagtgatgcgtttcaccgtttccatattgtgggagataatttccggttgtgcttcaataacctgggatactaattcttttcttccttgaaagtcggggatcagaacctcgatggtagtttccggattgaggcgtttgatttcgcgtatggtgcatgcccaatgtgcagcgccgagatccggtagatcatcccggtctacggaggtgatgacagcatgggatagtttcatcaaggctatggattccgctacatgggtaggctcttccatatctaatggaagcggtttgcctgtctgtgtattacagaatttgcagcaacgggtacagatgtcaccgcctatcatgaaggtggcagtacctttaccccaacattctcccatattagggcaacgtccgctactgcaaatggtatgcaggcagtgagattcaactatacgtttggtttcggtataccgttcattggctccaatacttattttgagccattcgggtttgcgtattctgtctttcatgatattgatttattgttcaccacagattacacagattaacacagatttctttatttctcttttttatctgtgttaatccgtgtaatctgtggtgaactttatgatcttaaagatttttttcaaagaaattcgttagcttcgtatacaggtgataacgggtgtttccgccatagataccgtggttgcggtttgtatagagttgcatatcgaattgcttgttcaactgtaccagatgttctgcatattctgcacagttttggaaatgaacattgtcatccgccattccatgtaccagcaataaattgccatgcaatttgtctgcccgggtgaaagcggaagagcctttatatccttcagcattctctttgggagtgcgcatgaagcgttcgccataaattgtgtcgtagtagttccagtcagtgacggctgctactgcaactccggccttgaatacgggcgttccctcactcatactcatgatggtcatgtatccgccataactccagccccagataccgatacggtttttgtctacatacggctggctacccatatattgggctgttgcaacctggtctttcgcctctttcacgccaagattcaggtaagtgcatttttcgaagtctgcaccacgtccgccggttccacgtccgtctacacagaccacgataaaaccacgactggccatataggtttcccaactgatgctccatgtgtccagtacctgttgtgaaccgggtccgctgtattgatacagaagtacagggtatttcttggatgcggagaaattcacaggcttcatcatccaaccgttcagacttacaccatctccggtcttgaaagtgaagaactctttctggggtacactgtatttggacaaagtctgtttcagattatcattcgtaacaagcgtactcaatactttacctgtattatcatttagagtaatgacagtgggagtattcaggtttgaataacgattcatgtagtatttcatgttcgtactgaactgtgcactgttgagacccggttgagaagaaagtttggttttctttcccttgcggtcaatttggtatacggcctggcgcagcgggctttcctcattactgatataatagaaactgttatcatcagcgtcccagcccaggaattcttttacttcatagtttccgctggtaacctgtttaatcagatttccacccatgctgtaccagtacagatgattgtaaccactcttttcgctcacgaagctgaagttttccggatagaaaatgatattatcgaatacgccttctttgatataagcatcactttcgtcacgcagaacctgtttgcaaacagtagaacgcggatcaccgaaatacatgtcaagacgattctgatggcggtttaaggtgataatggccagtttgttaggatcttgtgtgaaacggatacgtgggatgtacccgtcagcatccaagggcacctgcatcttgcgggttactttcgatttgatatcgaaggtatgtacactgacctttgaattcgcttctcctgttttgggatatttataggtataatctcccggatacttctcaaaagctgtgatatggggattgcttcctgcaaaaacggggaagctgtaagagggtacttccgtctcgtcaaagcggatataagccagcatcttgctgtcggcactgaactccagagcacggttgaaagagaattcttcttcatatacccagtcgggaataccgttcaaaacggcattacgtttgccgtcttctgtaacctggctttcgctgtttccgtagagaaacttcacaagatagatattattatcccgtacaaatgcaaccattgttccgtccggtgaaaatacaggtgcttgctgcgggccgccgtctgaaagcttttctactatgttattgatttctccgttgacatttcgcttcagactatatatataatgtatagctgtataagagcggcgataaatcggagtctgttctgtagcaataagcagtttgctgccgtcaggtgaaaaactgtagctgtcaaacgtcttaaacggacattcgcgtgcagtagcagcatcgaacaatacttctacctgttttcctgtcttgaaagagtatttgatgatctgcgttccttccgcattcatttgcgaatagtgttccccgtctccgggaatgggaatgactccgtaaatattttcagcgcggaatttacctgatacaatatcttttaaatcaagaggctgaccgccttgtgcaaagcctgccaatgtgcagaggcaaagaagaattgcaatacttatctgtttcataatcctgtttgatttctttagagggcaaatatagggataaatataaaaaagactataataaggtggcacacatcttacgtatttcgtgcaatctattggctagtgcactttctttgcgggcaacagccatattgtagcgggtttgcatgttgacaagcaattccgcattaatgtccaaggcggcttctaccattaaggcaaagtcactggttatgggacgttttccatttagtatttcattaagcatagtataggatactcccaaaacttctgaaaatttcttttgggaaattttgcggcattctaattcttctttcaaaacatctcccggatgagttggtattctttttattgtatccataattctattgataatgattagttatatccagtacggtacatatagttaaaactgtttcgcttccttctttttttattttgaattccagccgataatgatagtctatacgtatagaaaaactgtccttaccacttaatgcctcaaaatttaatgagttgaagacgaataaatcttcaattcttgttgctcctattaaggtatctatacgcttctggtacttctttactacagatgcatcaaagcggtgtttcttgtcctggcatttgttttatatttatgctacaaagataattctaatttgagatattcactcatttagtgaatactaatttagttttattcataaagaaaaagcccgtccagctttgtgggggcaaagctgaggcgggctaccgtcactcataaatgatgattggggcttcttttggttagaggatttttactttcttttgatattcggcaatagctgcatccaggcgttcgtgagcagttgtgtcgcccggtacgttatgtgacggatggatatacagatgtacgccgcgatctgccagaatttcggcaacggtagtgatggtcatccataccatagtaacgaaactcagggttgacaatggtcccaccttgtcgaagtgattcttcaaaggtacggaagcatctaccaaaggcacgcaggagtccactatgatatcggcaagttggaacaggttcttaccgctggaatgacggcttgctttgtcgccagtttctccggctgagccgtaaacgattactttcataccgcgcttcttagcttccagtgccatgtcgatgtttactgcattgatccctgtgtgagagaaaatccagatgcaatctttggaatcgaaatcataattcttcatgattgcctgtccgtaaccctctgttctttccagaaacaggaattgatggatacccatttggccgatgatttgtgtaaagaatgtcagcggaagttcgcacagtgggtgaaaacctacaaaactaccgatacgaggatacatctcttcaacgggaattgttgcgtgaccacatccgaacgtgtgtacccaacggccggcttcgatggaatctgccatagcagtggctgcctttttgatattctccaattgcgtggcttccagtttttccatgatgccatgcgcgttttttaaccattcaagtgctaacataatttttttgatttttagggggtaaataatttcttttatttgagtgagcgtttaaacaatagaagcatgatgagcagggaggcaatcatcatataaggatacacaacgatactgtatccttgcgagataattcccgtgaggctgttcagtaatgtctgtccgatcagagctataacaagggccacactgaatgccgttcccgacagagaagcgtaccggctgccgacaatgctgagtatgacggggaaagtagatgccagtcctgcaccgacaagcaccatacctatggcagcacgtgcaaagtccggtgaaaaagtcagcagtgcaaaacctattgcggccgtaatcaggctggcgcgaagaacagtttcctgttttatctttttgaagagaactaccagcaacagacgggcaacagtcagtccggccaccatgcaagtcagtgccatgagcgcccggttttcggggatgttggtggtttgtcccaggtagagtgtggtccagttgttgcatacaccttcgataccactttggaaaaagaggataaaactgagtaataataagctactttcttttaataaccccagtccttctttgattgggaatccttgcggctgtttgggtgcggggaagcgtacaccgagacagaacaggatacctgccaacattacaacgcccgtgccttgcagtataatttcaaaagaataatatccggacaggaaactgagtaatacaggaatccccagcgcaccgataccatagaatgcacccaacagactaaggcgtgaacctttctccgcttcgtcggaaatatcagctactaaagcatttgtttcaccgttcagaatccctcctcccaggccgattccgataatggaaagttgcaacaatgggatacttgtaaagaaagcaattccttccagtccgagcaacacgaccagacaactgagcagcagtaacgctttgtgtccgaagcgatctacaatagggccgaacaacagggagcctcccaataaaccgagaggcaggaacgtcaccagtgcggtggcttggagattgtccaaacccagtttggtggtgagggacggtagtaccgagcccagggtgatcatcgaaatgccaaagaagcacataccgatgcacgcagccgtgaaaaccagattcttgttgtaactactcatattcttattaataaaaaagataaggtggtcagattactcgtacaggtgctttttaatagcgagaaaagcagctcctatcagtccggcattaccggacaattgagaggctacaaattccacctgcttgatactgagcggttgcgcccatttgcaggcttctttgtagatatcatctatgaagataccggcagggccgaatacacctccaccccagattatcttttgcggattcagcaggctgacaaagttggcagaggccattccccacatttctatggctttgtgcagtacggaaactgcaatcggatcttcctcattgtatgcgctgaatacatcataagcggaaatgcggcagataggtttttgacgtaagcgtcccttataagctttatttgcacggactgcatcccgcactctggctccgataccatttcccgaggcataatattcgaaacaaccgcaggcatcgtattcttctttatagggaggttgcagtgccatccagccggtagcaccgatgatgtcgcttgcaccgtgcaacacgtgtccgtcgataatgattcctgcacctataccggttcctacggcaatgaatactgcactatggcaatctttggctgctccctgccacatttctccatacatatagcaagtacggtcgctgtcgatgtagatttctatatctggtgccgttacggtacggagtacttcttgtagcgggtagttttcccagccggggatgttcggggcccatacacgtcccgtctgcgaatagacaatgccgggaacacatataccgacaccgtcaatctggatacggcttctgcgggcaatagtcaggagtttagcaaggatttctgcggcaagtttgcctacttcgtgtcccgttcttcctttcagcagacgctttcggttgaacaacatacttccgtcagggaggaatatagcgcttgctattttggtgccgcctatgtcgagagcgatggtagccatggtattatagtatttataggttgatctatcaaggttttaggcaaagctatgaattaatttcgttttccatgcttatttattgaaggaaatgtgtgtaaaacatgttgctgatcactaaaatatatttaatggattcaccttgatatgcgatgcttgtattctatcttgtttaatatcaatagatgaaactttttttaatgcagtgtaaaataaaaaaaaattatgttcgttaacgttttgttcgggatagttagacggatatgtgagttatagcaatggagtttaaaatgcctatctataagtttacacatacttttacatgcacgcttgcactcatatcttgcatcgccttattcatcggggttagagcggtggtggcagcaaataaaaagaagtgtaggcaaatttgcctacaccaagtgatatatgtatatatatcactcataatctgttggatacgtcatgtgagatgctcaaaatgactgtttggcaatctgctgtttttatgcctttttatgaagaaaagcatggaaggtatgccgctttttgcttgatatacgtcttcgtccgttcagtatacgtcataatcttgcgtcatccggcctgtatttctttcactaaccacccatgttccttctgcttacactccatgtttcttccgctgacaagcgatgttttagcatgtctacgtatgtggttcaagtgcttcacataggtgaagtagtatgcctacaattgtgaagcacgtaaaccacagatgtatgcacacaaaattaaagcatctgaaggtaaagaaaacgctatgtaagagcaagtaagaggggatgcaaagcagaaggagatgcaaagcagaagggacatgaaaagcagaaggggcacataaaatacagggcaactataattacaaaacaactcttttaggccaattcttaacctttgattattagaaaattacaagaagtgcattttctgtcagcaagaagttaagagcttgtcgacaagaagttaacttcctgtttacaaactcttgacttcctgtcagcagagaatataaggtttttccattgactttacaaaaatagagacggattctaatactttttcccatcatgaatatcttttttcaggaattagaagagttgtcatcccgtatgaagtgaaaaagatatgcaaaaatataatgattaaataatatacaatgagctaaatgatgaataatactatctcaattcttctcctcccgagagcttaaagtatttatagatagactgttattaaatttgtgaaaatgaataatactactttttttataacgaaaaatactctgattcttttttttgcttcacttttcattcattaaaaattatggcagttatatacgacctgacacctttcaggtcagtgataacaaaaagtaatggctcgtagaaatacgggctttttttattaacaatttaatattaaacattatggaaaagaatgaagaattattggaaagattagtgaacgaaatcgcagcgcaaaataaatttattgcgctgctaatagcaaaaaacaatgtatcaacctttgataagtcagatacagagattttggaagaaatgaaatccgaaacagaaagtataattaaatggagctatttctcatctaaagaaagttttcctcttaactcgccagaaaaatcagtaataacatttgatgaaaaattatttagctaatatacttgaattgaatttcattataaaaccgcaggactgacattccaaggaggcatattctatattattacatgtgtcttctattaacaaggggtatgagcctgagtatgtaaaagtatttctaccgcaaaaaggacatttaaatctttgcaatttagttcctattttttctttttctttttctgtaagcatgtcgtagtattttaaaagttaatatttcgacaaatgtactgtttatacttgataaacggtaatagatgcgtatgttctgtaaggatgttctttagtacccttacagaactttctctcaaaaatatgttgcaatttacttgcatacataactgaaaatgactatatttaagcgatttaaaagattgacattatgaacactgaatttactcttttaactctatctgatattttccgaatgaagaaagttgcatcaggtattttgaaaagatgagatggggagataaggttatatcgccctatgataaatcatctaaagtctataagtgtgccaatggtaagtataaatgcaagaataccggacgatatttcgatgtaaaaactggcactgcattcgccaatactaaaatgcctatgagaacttggttttacgtaattatgttgttcttatcacataaaaggggagtttcatcatgtcaaatcgcaagagatttgggtataactcaaaaaacagcgtggaagatgctccacaagattaggcagtatatggcaatggagaataatcatactttatccgatgaggtcgaaattgatgaagcattcgtgggtgggaaaaacaagaataggcacaaagataagaaagtagagaaatgccaaggcaggtctttcaaagataaagttcctgtgtttggtatattggaaaggggtggtaaattaatagccaaggttgttcctaacacacaggctaagacattagttcctatcattaaagaatgcgttaaagaagaaagtgtagtttacaccgatggttgggaatacaccggattacatggtcattatgaacaaaggtctgtagaccatgaaaaacatttctatggtatgacttacgcaaccgatgaaggcgaaatcattactattagtactaatggaatagaaaacgcttggtcgcatttaaagagaatgatatttggaatctattattgtgtaagcaagaaatacatgcaacgatacattgatgagttcgtattccgatttaatactcggaattttagcgattctcaaagatttaatttacttttgcgcaatgtagcataggatatgggaaagaaacaaaaagaaaacataattagagagaaagattcaatatcaatgaccttcgattttgagttaagagttccgaagaaagaatttgatgagcttcttcggagaatggctaatatcaaaaaagaagatgaatctcttaatgaagaaactgataaaaaagaagaaaaagaagaatagaaataatgaagttattcttatatttgcagcgtatcattgaataatggtgcgcttttttatgataatatagctcaatcgcctctgaatcaccacctcaaagaatgaacgagttatatattacacacgttgaggaatccgcatagacgcagatttcttgctcagtgtgtaacggcttgtggtgagccaagaggcgtagagcaattatctgcgtctttttcatatactgacgtatggttattgctaacagaatgagttttagtattaaccaataaattcacagttatgaaaagaaagtatttgtttttgattctcttatcaacagtttgtgtttcttgttctaatgtaaaagagaaagaccctaaaataacattgttagattctattagagaagccgattcaattgcagcagtgcaagaagcggcagaagcggctttagaggcagcaagtgaagaatatcaataccataccttagatggtaaaggtaagcaaaaagaatatcaaggtagcctagaacagcaagaacatcttgatatgatagacagaaaaatggaagaagaccctaacttttagcgtatatatctaaattatggaaaatcatgcaaacaatcaagtgtattgtcccttttgtggagggactaatcttattacaaatcaaaaaggattcggagctggaaaagcattaacaggtgcggttttagcaggtggaattggcttattagccggatttataggaagtaaggatataaaggttacttgtttaagatgcaaagaaacatttagcataggacaagtaagtacaatacccccatctgaggctgaaaaagaaaggtatcaggcttcaaaacaccctgaactatacaacccacaaccagaaaaaaatagaccgataccgaactggattggatacaccatatttgtgataggaataattgtagtgttaattcttgcttattatagtaaccattaaagaaaaaattgctatcttagcggtcgaataaaaagaacgtgctcccaacaaatttagccttgttgggagcattttttataaccaaaagttataacgacagggctaagtgttaagtcgtatataactgccaaaattatatatattgtatctttaccgaagctctatctcaaagaaaagccttatttttgtaacaaataacagctttatggatgtagcacctatattatacaatgagtttccgcttttcctgaaacgttattttccgtataaggtacagaaaatatcactgaatgccggtttcacctgcccgaatcgggatggcgtgaaagggtatggtggttgtacctattgcaataatcagactttcaatcccgaatactgccgtacggaaaaatccgtaacccagcagttggaagagggtaaagtctttttcgcccataagtatcctgaaatgaaataccttgcctattttcaggcatacaccaatacttacggtgaattggaagcattgaagcggaaatatgaggaagcactgtctgtttccgatgtggtcggtctggtcattggtacccggccggattgcatgccggatactttgctgcattatctggaagaagtgaataaaaacactttcctgttggtcgaatatggtattgaaagtacccacgatgccacactccgccgaatcaatcgcggacacacttttcaggatacggtagatgctgtggaaaggactgttgcctgcggtattcttaccggtgggcatgttatattgggacttcccggtgaaacgcatgaggatttggttgcacaggccgctacgctgtcgcgtcttccgattacaactctcaaaatgcatcaattgcagttgatacgcggtacccgtatggcacatgaatatgaacaacatcccgaagacttccaccttttcggggtagaagaatatattgatttggtaatagactacatagagcatctgcgccctgatttagttttagaacgctttgtctcacagtctcctaaagaattgttaatagcacccgactggggactgaaaaattatgaatttaatcatcgaatacaaaaaaaaatgcgtcagctcggagcttatcagggaaagaaatatgatatgtgagaaaaaaaacttatttttgcggctgtttgaatgtagaatcaatctaaataaagaagttttatgaaccagaagactatgataaaaggaaaaatacactatgtaggagtcaatgatcgtaacaagcacctgtttgaaggcttgtggccattaccttatggagtgtcttataactcttacctgatagacgacgaaacagtggctttgattgatacggtagatgcttgttatttcgaagtatatcttcgtaaaataaaaagtattattggcgaacgtcctatccagtatctcatcattaaccacatggagcccgaccattccggttcgatccgcctcattaaacaacattatcccgatattgtcattgtcggtaataagcaaaccttcggtatgatcgaaggttactatggtgtgacaggcgaacaatacgttgtgaaagatgacgatttcctggcattgggacatcacaaactgcgtttctacctgacaccgatggttcactggcccgaaactatgatgacttttgacgaaacagaaggtgttctattctccggcgatggtttcggatgtttcggtacgttggatggtggtttccttgatacccgtatcaatacggatcgttattgggatgaaatggtgcgctattactccaatatcgttggtaaatacggttctccggtacagaaggctttgcagaaattgggaggattgcacattacgaccatctgctctacccatggacctgtttggacagagtatataagtaaagtaataggcatttacgataaactaagtcgctatgctgccgatgaaggagtggtgatagcttacggctccatgtatggtcatacagagcaaatggcggaagccatcgcagcggaactatctgcacagggcatcaagaatatcgtgatgcacaacgtcagcaaaagcaatccttcctatatcattgcagatatcttcaaataccgtggtctgattattggtagtcccacttatagcaatcagatttatccggatatcgagtccctgctttccaaaatactgatacgcgaagttaaaggccgctatctgggttacttcggatcgttcacttgggcaggcgctgcggtaaagcgtatggctgagtttgccgagaagagcaaatttgaaattatagccgaccctgtagagatgaagcaagcgatgaaggacatcacttacgaacaatgcgaacacctggcacgttctatggctgaacgcctgaagaaggacagggaatagtaatttttgataagatacccctaatttattaacctgataaaaaacaatcacaatgagattaatcattcaaccggattatcaatccgtatctaagtgggctgctcattacgtagccgctaaaattaaggccgctaatccgacgcctgaaaaaccgtttgtactgggttgccctaccggttcgtcaccgctcggcatgtacaaggagttaatagacctgaataagaaaggaattatttccttccagaacgtggttacttttaatatggatgagtatgtgggtctgcccaaagaacatccggaaagctactactctttcatgtggaacaacttcttcagccatatcgacatcaaaccggagaataccaatatcctgaacggaaatgctgccgacctggatgctgaatgtgcccgttacgaagaaaaaatcaagtcttacggtggtatcgacctgtttatgggtggtattggtcctgacggacacattgccttcaatgaaccgggttcttctctgtcttcccgcacacgtcagaagactttgacgactgatacaatcatcgccaattcccgtttcttcgacaatgatgtaaacaaagtgcccaaaacggcattgactgttggtgtaggtacagtgctttccgccaaagaagtgatgattattgtgaacggacataataaagctcgcgcgctctatcatgcagtagaaggttctatcaatcagatgtggaccatcagtgctttgcagatgcatgagaagggtatcatagtagctgatgatgcagccacttttgaactgaaagtaggcacatatcgctattttaaagatatagaagctgaccacttggatccggcctctttgctgaagtaaacatacaactgatataaaggtaatttgcgcagttcgtttccgctaataggtgcgaagcggattgcgcgattttcttttattttgtccaccctctcttgtttgatattatctttatcgttcttacctttatgaccttgaatgaataaaatcgtttgtttatgaatgatatagattgctcttacgacgatttgctatgccgctctctttcattgttccgtcagtttcggttgtatgacgatcgtatagaagaggataatgcttttgtttttttaagggaggcggaaaaagtagtcagtgataccagaaatggagtttgtgtggctaaattgggatgtgtaatagaatgtcttgcccacagattttatataaacgatgatacggatgtaatactggaagaggtagatgcctttctgattaaattttggaaaggtttgaagcagccttcttcggaaacatttattgcttccttatggattggagaatactttctgttgcgtttaaagaaccccaaatcccgtctgcatggtcgtagtaaaaaaatggtttccaaaattctgtcatttatggctgatatgcttcggaaaccggaaaaacaaaaagtactcagtctctcttctgttgctgttcttgaggaaactgtagattgggttaaagaagtttgcgatgtacatatctgtgaaaaacaagtcgtaatcctgctagaaaggctttattatcttcaggaaaaaggtatgttgggagaagaagcagatggaaagaacgctttgcggcggcaaatatgggatttttattattgaatgttatctttacaattaactttatctatactatgaacgtgcttggtggagttcgcatccggggatggatataaatcatactgcgcagcttgttctgtcgaagagcacggatgatggtaaaacctggaaaatgcataattatgcccgtacgaatacaacggaggcgcaggttgtcgaggtagaaccaggggtgctgatgttgaatatgcgtgataaccggggcggtagccgtgccgtagcaattacgaaagatttaggtaagtcatggactgaacatgaatcttcacgtaaagcattacaagaaccggtttgtatggcgagtctgataagtgtaaaagcaaaagataatgtattgaatcgggacttactcctgttctccaatcccaatacgacgaaggggcggcatgatattactattaaaatgagtctggacggaggtgtaacctggcttccggaacatcaactttttattgcgaatacgtattcagcgaaattttagtctaatttctttccatccagatattccctcttgaacatatctacaaacaggaagaatagtgacagtaacagtggtccgaagatcactcccatgaatccgaatagtgacaggccgataacgactccgaatatagtgatcagaggatgtatatcggccattttcttttgcaggataaagcggatcagattatcgagctgagagatgatcagtgttccgaatatagccagtccgataccattgaaaaggtcgccggataatgccatataaacggcaatcgggaaccataccaatgctgtacctaccatggggatgaccgtcgcaaggcaggtaaggaatcctgtaagcagaatgtccggtacatcaaagaaccagtaaccgatcatggctactccaccttgtatgattgccagcaaaggaataccgacggcattggagtgtacaatcatcttgatgtcgtgcactacatgctctgtattggcttcgctgaaaggaagtatttcgctgatgtatttctccatccgctgtccgcctatcagcataaagtaaagtacgaataccaaaacgaaaaggttgactgcaaagctactgatgctgcccatgacgaattgccctatggcaggaagtgcggagataataaaggaagtggtatccttgcccagtacatcgtaaccggttttttccttgatgatatttgctgcactttcaatcggggcaataatactttgcgggtcgaggttgatatcctgcaatttgctgaccaatagccagactgccagtgccaaaggaaccagaaagaagaggatagcttcggtagtaataagagttgcagccacacttcgtttcattttccgtttgtcggtcagatgtatcatctgtcttctgaccaggatatagatggtcagtgcacccaataaaccgcccagaaagggagtaatctgtaggaacaggattatacccagcccgatgattatagtgattagtgaatatttccagtattgttcttttgtactcatattcttttttgctgttttcttaagaaacaaacaaagtgagcatttggttggttatccttcattcaaccagccctttccctggcgaataacttcaatttctccgcttgtgcagtctacaatggtagaaaattctgtaccgccgataccaccgtcaatgaccagatcgacaagatcaccgaatttttcatcgatcaattccggatcagtgcagtattctatatcttcgtgcgcttcgtgcgggagagtggtagtcatgatgggagcgtccagaatacgggctatttcctggatgatagcattgtcgggcatacggatacctacttcttttcgattacggaaaatctttggcaggcgggtagtgccgttcaggatgaaagtgaaagcaccgggcaggttgcgtttcatcagtttgaacgtattgttatctacctttgcatattcgctgatgctacttaaatcatagcaaataatggaaaggttattcttgcgcggatctatctctttgatacggcagatacgttcgatggcacgttctttcagcccatggcaaccaatggcatacatggtatcggtgggatagatgatgaggccaccgtcattcaaaatatccactacctgttgcaggtcttgtggattattgttcttttcgtaaagtttcagaagcatagggctgataattagtctatatataataacacaaaagtagggaataagtttcttattctcaaataagtgtggcttatttcttggatgatttttttcgaagttcttctgccagtcgccattgcaatgctgcctctacttcttttcctgcctgcatcaaggcgtccccgaagagctcatgcgctccggcatgttctggtttcagggtggtagctttgtccagatcggctatggcgccttcggtttcttgctgtttcagacgtaattttccccgattgtaaacagctttaaattcagccggacgtagtttgacggcacgtgtcaggcattcttccgcttcaagatatctgccgtcattgaagagggtgatgcctttacgtatccatgcatccgtatattccggataaagttccagcgctttgtcgtagttggcgatggcggcacgagagtcatgggcaagagtaatggactcattgcccatcagataatactcacgtgcgtaggcttgcaaccgtttctgttgctctgccatttgggattttagttgatcgttgttgtctcgtagcttgttgataacccctaacttgcgacggatgaggcgttgaataacaggcttttctatgtcgtatcgggagtgtatagctttaaagaaatggttgaggaagacttcgaaatctcctttatcgaatgctttggttgcagcagcatattctacgtcggcttgcgcctgtttcagggcgcggtctatggcttgccggttattgaagcgttcggcaaaattcactatttccgggcgtacaaagatatcagcccgattcacaggtttctttagttgaataccttccagtgaggtgcagcggctgagagcgacgtacgcttgtccaccggcaaatacaccgccggtgaaatcgatgactacacgactaaaggtcagtccctgacttttatggacggtgatagcccatgccaatcgtacgggaaactgggagaaggtgcccaacacttcttcttcaatttcttttttcttttcgttgtatttatagcgaatgtttttccagtgctccggcttgacgtcacattctttcccatcatcagtgatgacatagagcgtttcttctatctcatcgaaaccactgactacaccgatagtgccgtttacccagcggcggtcgaaatcattcttgataaatatgacctgtgcacccggtttcagcacaagctcacgcgaagtgggcagactgctttcgggaaagtcgccggtgacttctccccggaaggtaacagcgtctccgggcagttctgccagtttccggtcattgatataatctacgttatcgcggcgcgtagcgagggtgatatacatatcttcctcattctcttcgatgtcggttccgtagcgggtgttgagtagttgcaggtcagcggcaccggcagtattgctgcgaatatggtccagaacgctgacaaagactttgtctgtttggcgatagaccttttcaagttcaatggaaacaaggtctatctggttgaaaacccttgcagagaaaaagtaaggagtaggatagaagcggttcaggatttcccgttcatcacctttcactacaggttcgagctggaaaacatcgcctactaacaagagttgtttcccaccgaaaggttcgcgcaggttgcgtgagtagacacgcaggatacggtctacggcgtcaatgatatctgcccgtaccatggaaatctcatcgataataatgagttccagttcttccaatagttttcgttggggtttggtgtatctgaagaattcgtgaatgcgtccgcgttgcaaactcagattcggatcatcgggaagcaaaggatgaaacggtaatttgaagaaactatgcagggtgctgccaccggcattgatggcggcgataccggtaggcgccaataccacatgtttcttttttatattctcgcaaatatatctcagaaaggtagatttacccgtacccgcctttccggtcagaaacacggactggcgggtatattgtatgagactcagagcatcctggaactctttgttgctggtatctacggtttgggacaagatttagtaattaataattggtaattagtaattaaaaagaggattatataatggagaaatgtttaagtgcattggctactccatcttcatcaaccgaagttgtaatgtaattggcatgttccttcacttcgtccacagcatttcccattgctactccgatggcggcatggcgcagcatacttacatcgtttcctccgtcgccaaatgccattgtttcttccaggcgaataccgaagtgattgatgatttcgtcgatacccttttgtttggtatttcctttggcggtgatatcggcaaaggcaggaaaccaacgcccagattcgcagtccggcaattggggaagaatctctttctcttgctccagtgtaatgaacggtgtcatctggaagatttcccggcgaatcgcttcttcaggtgtctttacgggaagcacatctactttcagataatcgttgaatatctttttcaccatatcgtccggctggcagacgcagatatcatgttcgcctacaaagatacaggggaaattctgttcggaggagatgcgtgccaatgtctgtacgtcagcagcaggaatcgcgctcttgtaaatcacttcttcacctacgaaacaatatccgccgttcatggttatataaccgtctattaatccacggtcctgcaaggcagaaaggttgttgatgataactgcggggcgtcccgtagcgataaaaatccgaatgcctttggctttggcagcggcgatggcttcgatggtggttgggggaatagcatgggtattaaaactcactaaagtgccgtcgatgtcaaaaaacagggctttaatcatataatttctattttacttggttgcaaaagtactcaaaagtgaggatattttgtacttttgtctcctaaagaaatcgtaaatagtcattatacattaataaaataataaaagctgtcttagaacgcagttaaatcgcaaatgaagaagcattccttaaaagattggctgatagctgtacgcccttggtcgtttccggcatcagcaatgccggtgattgtcacgctggcatatttgtattgggcatacggggtaatagaatgggcgaacggactgttagcgttggccggtattgttattttccacgcttcgggaaatgcgtggagtgattatttcgactttgaacggggagtggacagggtggatacatttggtgtgaagaccctgacaagcggacaattcatgccattggagatacgcaacctggccataggcctgatggtgccggcggtgatggtcggtctttggctggtagtccgtacggggcttcctttgttgtggataggtgtttgtggagctttgtgttcgttgctctatccgtggctgaaatatcgggctttcggagatttcgttatttttgtagcttatgccatacttcctactttgggtatatcctatattactatggggaaattcctgcctgatgtatggttgataatcgttccggtgggattgattacagtagccatcctgcacgctaataatacgcgtgatataggtacggatgtaagagcccggattagtactcttgccatgaggcttggggtgaagacggatattttcctatatatgttcgaggtgctttttccgtttctgtggatcgcggcttgtgtagcgttggggtattttccgtggtggtctttactgacgatagtaggaattctgcctgcaatagccaatgcacggactatgttgcggttgccgaaagaaggaattggtgttatatccaatctggatgaaaagacggcgaaactgcaactcttgttcagtttattgtttactgttacattcctgatatagtatgaaacgaattattattcctttattgatagctgctttcttgtggttctttatgttttctccctggacaagcggaatattcaacttctggacggccatgagtttttcggctattgtgttgatgaatatggcttttgcgcttcgtccacagtggtggatagaagatgtgaagttcgattggaagaatattgccggaggggtgggattggctgttgttttgtggggagtattctggctgggagataaggcttccgcttggcttttcgactttgcccgtccgcaggtggaactgatttacggaatgaaaaccggtgaaaatccttggttgctctccatattgctactcatattgataggtcctgccgaagaaatcttctggcggggatatgtgcagaatgcactttcgaagcgctggagcccgaatgtcggttttattgtgacaacattagtttatgcattggtacatatctggtcgttcaactttatgctggtgatggcggcgttggtggttggtgctatctggggattagcttacagattgtatcctcagaaattgggagcattgattgtgtcgcatgcagtgtgggatgtggcggtatttgttgtgtttccgatttaatgactcaccacggattacacggatttacacagatgaaaaaatatatttttgattttcctgctttatatctgtgtaaatccgtgtaatctgtggtaaaacaaaataaagctattatgaaatacaattttgatgaaatcattgaacgtcgtggtactaactctgtgaagtgggacggcgtaaagaatatctgggggcgtgatgatttgcttcctatgtgggtggccgatatggatttccgtactccgcctttcgtgatggatgctttaagaaaacgcttggagcatgaggtgttgggatatacttttgcttgtgaagagtggtataattctatttgtacatggctgcacgaccgtcatcagtgggatatatcccgagagatgctgacatttgttccgggaatcgttcgcgggcaggcttttgccctgcaatgtttcactaatccgggggataaggtaatggtgatgactcctgtttaccatcctttcttcttggtgactgaacgtatggggcgtgaagtggtatattcacccttggaattacaggatggacaatatcatatcaattttgagcgtttccgtaaagatttgcaaggttgtaaagttctgattctctgtaatcctcataatccgggcggacgtgtatggacagcagaagagttgaaagaaatagcggctatctgttacaataatggcacatttgtgatttctgatgagattcatgccgatctgactttgcctccttataagcactatccgtttgccacggtttccgaagcagcagcatcgaactcacttgtcttcatggctcccagtaaagcattcaatatgcccggattgggaagttcgtatgcgattactgttgataaggatattcgtgaacgttttcagacctttatggaggcgggtgagttttctgaaggacatttgcttgcctatatcggtgcggcagctgcttacatgcatggtgcagaatggttggagcaaatgcttgattatataaaagagaatatagattttacagaagaatatctgaaagaacatattccaggcattggtatgatacgtccgcaagcttcttatctcgtttttctggattgtcgagctttggggctgacacagaaagaattaacccgactttttgcagagaaagcacatctggctctgaatgacggaactatgtttggtcaaccgggagagggctttatgcggttgaatatcggttgtccccgttcagtgctgaagcaggctttgcagcaattacgtgaggctgttgtgcagtaatatcaaaaagaagaatctatttttgttggccgtacaggtctatactatatgaagaaactcttatatctttttattgtaagtggtattctgctgtgtgcttgcaggcataccgatagtactgctttgctccgccaagcggatgcggtggtttatggcaatgcggatagtgcaatgaagctcctgtcgttaatcaagaatccggagcggttgccgttcgaggaaaaaatgttgtatggctggctgcgtacatttgcgcataatgtacggggagcctccatggcggaagattctttgattttaccggcatttcattattttgtcgccggtccggacacggtaaagatgctgaattcattcgtgctgaaatccaaatatttgtattggcagaaaaagcataaagaggctatggctgtactggatagcggtattgcggcggctacggcatgtagagatacttatctgatggtcaatatgctttctgagaaagcaaacaggtatgtgtacgttgagaaggattataaaaaggctatagaagcacatctcagagcgattgccattcgtgaagatgaaggcttgtgctattctttgggtattgccatgggattacagggaaatgattcggcttcttactatatggaccgaagcattgaactagtggagaaaaagaaagatacgacgcgcttggtgcattatctgcgaaactacgcgcagctattgtcttatataagcagtgattataaaaaggcggcggaagtgtcgaaacgtctgcggagtttagcacccgatggggggcaggttgccatgaccgacttggtgctgacagaatgttttctgaaaatgggagagttggattccgcccaatactatcttgatcagggcagagcattacttgcccgccgggagaagcttctgagtacagaaaatatgatgacttattatcagggattgatagattatacacgtcatcgtacatttgatttcttgaaggtgatgcgttataatgattctgttcacaatgccctttatgccttacaaagtaccattcagcggaaggatgaaagtaaggaatcactttcgaatgctaatttgcaactgacggtagagcgacaggaagcgcaactgacgctgttagcttgtctgctgttactggttgttacgggtggtggcgcctttttctatatccgggctcgtcgtcatcgtctgattgaagcggaagagcgaatcgaaacactgaaccgtttgctggcagatgctacgaagggagacagtgaaccagggactaccggaaatgttaatcaggaagtggaagatggacagtttttccgaaaaatacttttgcaacagttgggcattattcgtttggtcgctacgcagcctacatcacaaaatcaagatttacttcgccgcatatccggcattacgaaccgggagttgcccgtagaaagtcttttggtatgggaggatttgtatcccgtgatcgatcgtatatacgatggcttttatactcaaatgaacagacgttttgggtctgtactaatagataaagaacagcagctctgttgtctgctttgcgcagagttctctacaaaagagatcagtgtagtgacgcagcaaagcattccgactatttatcagcggaagacgaatatccggaagaaattgggaatgggggagaaagaggacatcgtcagttttattctggagaaataatacctgcttttcacatattcgtatgtgtattcgtgttttttcgattatgaattaattcaccacagattacacagattcacacagatttattaatctaataatcagtaaaatagaatctgtgtcaatctgtgtaatctgtggtgagtcttattcattccttttcagaaatgcatgcgcctattcatacatataaatagtatatagactctcaaaagataaatatagagaatgaaaaatataatgtattgataattagtgttatatgtgcttctaatatagaacttttatatcccgatatagagtgtttgagacatgtttcacccctaactttgcatcaggtaaaaacgaaaagtgaaacatttaaatcaatcaaacgatgaaagcaaattcaatgaagactatcgggaaaagactaacattcttaatccttatcatgtgtgtggcagtttctatttctgctcaaagttatcaactctccggttgcgtacaggacgaaaacaatcagccggtggaagtagcaaacattctgttgaaacaggctaaagacagtacttatcttacgggtatgctgacggatgcacaagggtgttttacctttactcaacctaaaggggaatatctgttacatattactctgataggttgtgaagatatctatttacccgtctccttacagggaaataagaatgtaggtatgctcaccctgaaatcctcttctacctttttgaatgaagtaaccgttacggcagctcgtccggtaatcaagcgtctggtagacagagttgtttttgatacacataatgccatcgctactgccggaggaaatgcactcgaccttttgcgtgaagtgcccggtctgcgcgttggtcagaacagtattgatattataggtaaaggaggcgtgaagatatatatcaatgatcgtgaaacgaaactttccggtgacgagttgattgactatctccgttcttatgacgcttctcagatacagaaagtggaagtaattactactccgccatccaaatatgatgcggctggtaatgcaggtattatcaatatacgtctgaagtcacgtcctaaagattatctgggaggtacggtatctgcttcttataatgcaggcgaaaaggagaattacggttatggtggtgtaaacctgaacatcagcaaaggtcgcgtatcttctttcatcaatgcaggtactacgcaaggcaactatgagaaccgtgaggcgaatcgtcgctattttgctcagaatacttgggatgggcgtacggattataagaaatatatgcagagttattatggtcaggcaggtgtggactttgcgctggaacgcaactggacgttaggtttgcaagctgtttacaaccacaataacccaaaagattccaaagcagtttctattacggaagtttatgacgtggctactgcccgtctggactctcttttattctctgacagtgaggaaggaactaaagccgaccgtgttaacttgaatttccatactgacaaatcctggggtgataagggtaaaaagatgacctgggatgtggattacctgtatgataaaagagatagtcacatggggttcctgtctgacactcagactcctgacggtgtaactatacccggaaccaattttgattacagttatttgcaaaaccgcaaagtagatgtattctcttctgcacttgactttacacttccctttgagaagtataaggtgaccgcaggtgccaaggtttctttcacaaatacccgtaaccgtatcaattatgatacttcggacccgacactggtgcaggatgattatttccactataaagaacaaatctatgctctttacgctgactataaccgtgtgtttggcaagcagttctctatgcagctgggcttacgtatggaacacacccgtactaccggtatttctgagtcggagaatacgacggacaagcacgattatacccgtctgttccctacactctatttcctatattcacccaatgagcagaatgcgttgaaccttagtttgtccaatcgcatttcccgcccttcacagaatatggtgaaccctttcccgttctatcagaacaagtatacttatgctcgtggaaaggaagacctgaagccgagttatacgtataatgccgaattgggatatacattcaagaataatctcaatatctctgccttttattcttattcggacgatgtattctttcaggttgtaggtttagatccggaaacgaatatcagttctttcctgtgggataactttatggagacacactctttcgggttgaataactcctatacattccgtacaaaatggatgcaggcttatgttcagcatggtgtaaactatagccgcacaacttccagtgccgcttccacatcagccgaagagaaaggatgggcttataatgccagtttgcgcaatacattcttccttaatccgaagaagacatttatcggaacgctttcaggttggtttacttcacgtcagtatagtggagtatatctgataaaacctacttatggtgtcagtgcgggtttgctctatcgcatgctggataataagctcagtcttagcctgaacgtcaataatattctaatcagccattcgaagcttgaaactgtttccaatggcgttcggatgacgacggacaatcagtttgcctttaccggtttccgcatcggtgtttcctacacgtttggtggagatatccgcagcaagggacaacgtaatagtaactcagatattcagaacagattataaaaattgctttcatcgtttttacctagctgaaagcactcccgtggcgggagacgaacggcttgtcagagtgaaacagtggtttcaccggacaggccgttcactttgtttccataaagtatatgaatcattcctccttttctaccagtttttaccccttactttcttcatgattgctcacttttgcataccaacaaacaaatctataagaggaagtatatgaaaaacaaaatgaaaacccgagtaatagagatgaaggacttatgccttttatggttcttcttgttcttattaggtggaataccggcaagagcgactactatttctgatgatgaatcagcatccggtacggaagaattaatcgctttccccggtgctgaaggttttggccggaatactaccggtggtcgcggtggtaaagtttatcacgtcactacattggaagatggaatgcaggcaggaacgttacgtcatgcgcttgcgcaaacaggtgcacgtacggtggtttttgatgtagccgggactatcttcctgaaaagacctttaagaatcactagcggagatttgactattgccggacaaacggcgccggggcaaggtatttgtattgccagacgtccggtaactattaacgccaacaatgttattgttcgttatgtacggtttcgtgtcggcaatgaaggcggtggagaacccgacggacttggaagtaccgattgcaagaatgttattgtagaccattgttctatcagttggtcggtagacgagtgttgttcggtgtacggtggtgaaaacctgactgtccagtggtgccttgtttccgaaagtcttcggacggccggtcatgccaaaggaaaacacggatatggagctatctggggaggagcgaaagcttcttttcatcataatctgctagcacatcatgaaagtcgtgtcccacgtcttggtccccgtcctttcactcaggaacgcgaacatgtggatatgcgtaataatgttttttataattgggcgggaaatggctgttacggtggagagggaatgcatgtaaacatcgtgaacaattattataaaccgggtccggctactcccaaaaacagtcctgtacgctatcgtattgccgctcttggagtgcgtactacgaaatattgcaccaaagcagatggtaagcccaatgtttggaaacctatggaacatgtatgggggaaattctatgtggacggtaatgtaatcgaaggtaataaggaagtaaccaaggataactggacaaagggtatttacgaacaaatcaagaattcatcctgcgataatactttcactaaacaagtgaagaaagagatgcgcctggccaaacctttggatgcaggtattgtcactacacataccgctgaacaggcgtatgatcttgtattggctcacgccggttgttccaaacaacgtgatattatagatatacgtattatagaggaaacccaaaacggtacggctacttatattggcagcgtgacaaaaggcgctgaaaatgctcccggattgatcgacttaccgacagatgtgaaaccggagggagctactagtgcctggccggaattatcgaatggcggtgttacagatgatgagctaagagatactgatggcgatggtattccggatacatgggaaacggctcatgggctgaatccgaaggatgcttccgatggcattactactacattgagtaaggaaggttataccaatctggaagtctatatgaacagtctggtaaagtagaagttgaaccaattattaatatattaagtatgaagaagataatttttacagtactatttatgggcattctatcgggaggatatgctcaagatagttcatcgccgtatcaggccgtagtagctttggatggtagcggcgactacacgagtattcaggatgctgttaatgctgcaccggacaatcggcaggagccttggctgatttttctgaaaaacgggtcttatcgggagcaagtaattattcccgctactaaaacttatattcatcttatcggacaggataaaaataagacgattatccatcactgtctgaatgtcggtggaaaacctgaagagggaactgaacctgctaaaacagcttactggaaacattctgttcataacccttcttctgaagttcataaattggaaggtagtgttgtttatataaagggagatcatttttatacggagaatatctcttatcttaatgactggggggtagatagtcaaaatggtcctcaagctttggctatgagtagccaagctgattgtgcggcatacaataattgtatttttcgctcttttcaggatacctggatgacttccagaactgactcccaccgtctttatgcgaaggattgctggattgaaggagcggtagattacttttatggcagtggagatgctttgcttgagaactgtacattatataatgtacgcagtggttctgtaatagttgctccctctcataaaaatgtgaggttcggatatgtatttcgcaactgtatagtggatggtaatgccgctgctgccgatggtaaacaaaagttaggacgtccgtggcataattctcctcgtgctgtttatatacataccactatgcgcattcctcttgctcccgaggggtggacaaacatgggggctattccgggcttatttgcagagtatgacagtcgcgatgctgaaggtaatatacttgacctgagtcaacgtaagactgaatatgacggacgtggtcctaataatccaccgaaaggttcctgtcgtgcaataatcaccaaggaagaagcggatggctatgtatacgaacgtataattccaggagatgacggatgggatccccgtgtgatgatggaaaaattgccgtctcccgcaaagttgaagaaaaaggggttgaaagttagttggaaagcagtacctgccgccgccggatatgtcatttttgataatgaccatgttgtcggttttgcaaaagagccggtctataatttgtcatctgaaataaaaggaaatttaaaagtatgtgctgtcaatcgttatggttcattaggaacagaaagtgtcctttagttaatgaattgtaatggcgctataatatattgacattttttgcatgtggaatcccgggcttgtgaaagtctgggatttttttgttaaaactactcagttatagcctcaaactgaattattactccctttctggatgattttactctttgaatactcttctatttctgaattttgcaaaagaattaataacacaggttaagttaagaaatgaaaagctttacgaaaaacactgtacttattgtttaactaaataatactatcatgaaacaagaaatcgaaaagatgaagagcaggttgcttctgctggcattcattttaatggtgcctattggagtgtttgctcaaaacattacggtaaaaggtaatgtgactgattcggaaggagaaccgattattggtgccactgttatggaaaaaggcaaaagccagaatggtgtcatcactgacttagatggtaattttactctgaatgtgtcaggtaaaggaaaaaagatcgttattacctatataggtatgaaaacggaagaagtggatgcagtaaccggaaagactttgaagattgtcttaaaggatgattcgcaaacactggacgaagtagtagtagttgccgtaggttatggtaacgcacgcaagaaagatttaactggagctatttcttccgtaggtgagaaaacattgaaaaacatcccaactacttcagcttcaagtgccattacgggacgtctggcgggtgtaagcgttgttacaactgaaggttcaccggatgcagccgttaatattcgcgtacgtggtggtggttctatcacgcagagcaatgagccgctgttcattgtagatggattccaggtgagtaatattaatgatattcctccgacggatattgaaagcattgatgtgttgaaggatgcttcttctactgccatttatggtgctaaaggagctaatggtgtaattttggttactacaaaaggtggtcgtgccggtaagacagaagtgacattcaatgcatcattgggtttgaaccgtttctataatgaaactgaggttctttctccctatgaatatgtttactatcagcgtgaattggacccggctaagaatgcaggcttttttgatcgctatggacagtgggaagatgtcgatatttataaaggtaaagaaggactcaactggcaacgtaaattgtttgatcgtaccggattgaagcagagctacaacgtaaacattaatggtggtagtgagtctttgatttatagtataagttacacacgtgatgatgaaacttatattatgcaaacatccaaatatcgtcgtgataatctgaacttgaagttaagcaagaattttaataaaaagttgagattggatcttaatgctaaaatgagtaataatgttattgacggccccagtgtatccagtggttccaaactacgtgactgcgtgaagtatcctcctattggtacgcttactgacctaacggaagacgacctggctggtgataatgaattgatccctgaaaatatcagtaacttgaacgaccccttctacaatattaccaacgagtataagaagcagtccaagttcaataatacctataatgttgctttaatatgggacgttattaaaggattacagtggcgtgcagaaggtacttatggctttacttttgatcgtactgataatatttatctgaagaatacaggtgaagcgaatggtaaggccggacagcctgttgcctatcgccaatattggaatggttcaaaatggacatttcgtactttgctgacttataaattcaagttgaaaaagcatcattttgacgttatgggcggtatagaagctaataactctgaaaaggatgatatgaaagtcaattcagactattatccgggtgattatttggctaatgacattctggctatgtggaacaatggtactgcagaacccacttatacgacgattaatgaacccgaccgcagcatgtcctatttcggtcgtgccaattacattctgaatgatcgttactatctgacttttacgttgcgtgcagacggtactaatgtatttgcacctggaaataagtggggtattttccccgctgcatctgctgcatggcgtatttcggatgaaagtttcatggaatggtctaaagactggttgtccactttgaagatgcgtgccagttacggtaagtccggtaatgcccgtgtcggttcctattggcgccagacttatagtccggtaacttctactaagaatctctattatcagaatgagattggacagagtagcttgcaacctgccaaacgtctgcgtaatgaaaatctgacctgggagtctaagttctcaacgaacgtaggttttgacttaggtttcttcagtaatcgtataaatctgacatttgattattataatgatgttactaaggacttgattatggaagtgcagttgccctctaatgcaggttatagtagccaataccaaaatcttggtcagaccactaatcgcggtgtagagttgtcgttgaatgcaaatctcgttcagacgaaagatttctatcttgactttaattttaatattgctttcaataagaataaggtagatgcattgtatggtgccaatggtgacgaaatgattctttctggtggtggcacagagaccggtagcgataactatcgtgtttttgtaggtcaggaagttggtttgatgtacggttatgtgtctgatggtatgtattcttttgatgattttactttcaatcctaccactaaaaagtgggatattgtgacgactaaagatgaaaatggtgtaccaatcgttacagattgttcgggtgtcctttctcgtgcaggaggttatttcggacctggtcacatgaaattgaaggacttgaatggtgatggagttattgatgctgataatgaccgtaaagtaatcggtcatgcgttgccgaaacacactggtggttttagttttaatgccggttggaaaggtttcgatgttacagcgatgttcaactggtcttatggtaatgatattctgaatatcaataaagtggactacacttcttatacaggttctaaacgttatcagaatctgagtaatgatatgagattggcaaatcgttttacaacgatagatcctgtaacaggacttaatatctattatggtgaatatgccaaccctgaacgtttgcaggaaattaattccaatgcttccatctggcatccgttaatgaacaatacgattaccacagactggttggtagaagacggttcgttcttacgcttaggcgttctgacgctgggatatactcttccgaaatattggactcaaaagttcggtgtgaagagcctgcgtgtctatgctactggaaataatttattctgtctgacaggatatagcggtcaggatccggaagtaaatacaagttccagcaatatgactcctggttatgaccgttcggcttatccgaagtccagatcctatatttttggattaaatgttacattctaaactaataaacttatgaaattacagaatatagtatatgtattgacggtgggaggtgcgctgttaacctcttgcagcgattttcttgatacggaatctccctcggtacaaagtagtactgttacttttgagaatgaaggtatgacgcgttcggctattatgggagtttactccgaattagcaggtacgtatgtttatggacagaaaatgtcggttaactggcaaggtgtttctgatattgaattggctagtggttatgctactgacccatctaaagacctgacaagtgatacaggggcggccaattattattgtgactggtacaacaagaccctgcaatggggatacatttttaaaatggcagaattggccagtacggctgtggatggcattcgtgcttcagcgctttataaaagtggtaatgcggcgatgaagcgttatttgggtgaggctttaacattgcgttcattgtcttattttgaattggttaggcgttggggagatattccttttaaggaaggtatgtctaactcggatctttccaatgtatatatgggaaagattaatcgtgatagtatttattcaagtattgttcgtgacatgcaggaggcagttaactatttgccttgggtaggagaaaattctgattataattgcgaacgcgtgaataaaggatttgccaagggattattggctcgtattgctctttttgcaggaggatggtctgttcgtgacggtaatcagtttcctgatgattctaatgtagaacactatcctaatgttgaaggaaatcccggtatggaggaagtaggaggttattatgttggtagacctaagaattggcgtgattattatgaaatagccgagcagcaatgtgctgaaattattggtgctccggagaatcctcatcaattggatcctgattatggacatatctggaaaacagtttgtggcttgaattataacgaatataatgagaatctttttgaagtagctaatggagtagggtatagtggtgacatcggtacattgatgggacgtgcaatggacggtggaatcgggtatggcagccgtggtttcggtggttcttatgtatgttcaaatgcgtattatttctattcattttctccgactgatactcgtcgtgattatgcttgttactggcctcagtataagaaagattcagatgcgaagagaaatcgtgaggtgatgcagactgatataatgaacgtgaaattgggtaaatggggcttcttctggacttctaatgcatatcgttctatagcacaaacagctacggctcgtactccgaccggtattaactggattgtgatgcgttattcagacgtcttactgatgtttgctgaagctcgttatatgttgggtaaaggaattgattcaaatagtgaaatagctaatatcagtgcccgcaacgcattggaacaagttcgtacgagagctttcggtgccggttctgaagaagtgaataaatatgatgctgatttctttgaggctattgttaacgaacgtgcctgggaactgggtggtgaaggtatccgtaaattggatttagttcgttggggattactcgattctaaaatagaggatatgaaaaaggcgatgctttatttgctggacggtactcataccatacaaatcttcgataaaacgtatgaaccaactgatttcccggtgaaagtgtactatagatatgataaggaaggtgaattcattgatttgtcttcagccaatttctatcgtaacttggccgataatcccgatacggaagtttattcagaagcgaattggttcccccgttcttattggaatttggccgaaggtaaagaaagttctttagttgataattcagtaaagatattgtcttgtgccactggtttgcgtaaatcttatgattatacggaattgctgggtactttgaagtatggcgagttgattcaggctaagttgaatctgatagatataggtaatgagatctgtaattatcgtcatttccattctatctattatgatgatatctataagtcaaaagggtatttgaagaactcttatggatatgataagcaaaaataaaaagttaacttattaaagaatgaatatatgaaacttagaaatatatattatatcttattgggagttctggcattttctgccgttgcttgccaggaggatgccaatgactgggggatagaaccagggcatgaccggttattccgtactactgaatttaaagtggctgataatacatctcctacttctataatgttaagttacagaggtataacggatgcttcaaagtatatctttgaatttagtaaaggagatagtctggaatttacaaatattgtgaagactgtggaaattttggcagacaccttgacaccgtatcgtcaggaaactactgcggttaaaacggaatatcgtacattgttcacagacttagatggaaccagccgttattcggtacgtgtaaaagcggtagatggaaaaacaggtaaagagtccggttatgtgggacttttctttgaaactccggatgagcagatatttacggaggttgttccttctacttccggtgctgtcttgaagtggaaagccgataagaccgctactcatattcgccatgccgaattgaagtttacggtggaaggagaaggggaagaacagactgttttgattgatacagtatgggtagaacccgctcacgagttaactgcaactgaaaaacaggcaggaacttattccattaaagacttgaaggcaggaaccaattatctggcatatatcttgaatggcgatgtgcttagaggtaaatatagatttttgacactgggctcttctgtaggagaaacaatagacgtacaatcaggagatgatattaatgctttgttagcttctgccccggtaggaccggtaactctggctttcaaaggtggagaaagctatacgtttggtgagatcactgtgccggcaaatgtgaaggccctttatatggcaggtaatgtgattgacggtcagctgcctcaattgacggctaccaaaatgacatttactgctccgctgggaactgtgaaatggcagaatatcgatttgataagtgacggacaatctcaattcttcattgaaataggcaatacgaattgcttcagtactatagcctttgagggatgtcatatcagtgaaattccacgtagccttgtgcgtttgaacagtggtgatgtagaaataaatggtattacaatcagtaattgtattgtgaagaatgtagcattgagcggctatggtctgttcaatttcggtaaagctaaatccctgaagaaactcgttattgaaaactctacgctttgtgagattggtgatcagttgatggatgttcgttttgttattgatgaaataaaaatgaataaatgtatcttctgtaattatacaattggtatgccgaaggtattccgtttggataagcaaccgaagtctattgctgtgacaagtactgtctttaccggaacgaatggtggcagcaagattaattccggaaatggagattattctggctacctggatttctccggttgctatttgacctctgacttccaagtggactctagaccgttcacgaatgccaagtctttgtctatgacatctctggaattgttcgtagatccgatgaatggggatttccattacaaaccggaattgaaatttgagggtgaaggcaaagccggtgacccgagatggtggatacaataggtaagattccatataggaaagattgttaatgatggagggaggttgttcatatgaacaacctccttttgtgtttaatctgctctgagaaacttttcgaattttgagatagtgcacttatagtacctgaatttcccccataatacctaattttcccgggtatatttgcataaaatgattaacaataactctataaaagtaacagactatgaaacgatggattttgattggtatggtcgtagcttccggtatgactatacaggcacaaaacaaattgcccgaaaagtttccttaccaggatacaagtttaactgcagaagaacgagcggatgatttgctcaaaagattgactttggaggaaaaggcttcattgatgatgaacggttctccggctattccccgattatcgatcaaagcgtatggttggtggaatgaagcacttcacggtctcgcgcgtacaggattggctacagtgtttccacaggctatcggtatgggagcatcatttgatgatagtttgttgtatgaggtctttacggcagtatctgatgaagcaagagcaaagagccggagattggatagtaaaggaaatcttacacgttatcaggcacttacagtgtggactcctaatgtgaatattttccgtgatccgcgttgggggcgtggacaggagacgtatggagaagatccctatttgaccagccgtttgggagttgcagtagtcaatggtttgcagggacccgatacagcacgatacaataaacttcacgcttgtgcaaaacattatgctgtacactcgggaccggagtggaatcggcatagttttaatgctgagaatatttctccacgagatttatgggaaacttatcttcccgcctttaaaaccttagttcaggaagctaaagtgaaagaagtgatgtgtgcttataaccgttttgaaggtgaaccatgttgtggaagtaatcgtttgctgactcagattttgcgtgatgaatggggcttcgacggagtcgttgtttcagattgtggggcagtatcggatttctggcaaaaaagaaagcatgagacgcatcctgatgctgccagtgcttcggcagatgctgttttaaatggcacggatgttgagtgtggaaatagctataaatccttaccggatgcagtaaaggctggacttattactgaaaatcagatagatatttcagtaaaacgtttgttgaaagctcgttttgagttgggagaaatggacgagaatgtctggacagggatttcttcggatgttgtggactcacccaaacatcgtcagttggcattgcagatggcgcgtgaaaccatgacattattgcaaaataataataatatacttccattgagtaaacaggcaaaaatagcattaataggtcctaatgcaaatgattcggttatgcaatggggaaattataatgggctaccttcgcataccattactttgcttgaaggtatgcagcgttatctgccaacttctaatcttatttatgagccggtttgcggacacacggatagtactttgttcattagcttattcaacaaatgttctacttcggaaggaaacggttttcattcaacatattggaataataatacctttacaggggaggctgttacggaagttcagcaatccaccccattcttatttaatactaatggggctgctccttttgcaccgggagttattttaagaggattttctgctgaatatcgttctgtatttcatccggaaaaaacagaagacgttgtttttcgtattcagatgcgaggcgcctatgaactttatattaatggtaaactggttaaggaagacgaaggagccgtgaagcaaatgacttccatttatacgttgaaggtagaatcgggaaagtcttatgatattttattaaagtatcgtcattttgacaaaacggcaaatcttagctttgatatgggagtaaatgctcagatagatgtgaaaggattgttggagcgtatcaaagatgtagatgtagttatctttgcgggtggtatctctccggcactggaaggagaagaaatgcctgttgatgcagctggtttcaagggaggagatcgcaccgaaatcgagttgccggctgtacagcgacgtgttgttgaggctttgaaaactgcaggaaaacggattgtgtttgttaatttctccggtgcagctatagctttggagccggaaagtcagaattgtgaggctatcctgcaagcatggtatcctgggcaagccggtggtcaggctgttgccgaagttttgttcggcgattacaatccggctggaaaattaccattgacattctatcgtaacctggctcaaattccggattttgaggattctaatatgaccggaaggacctacaggtacatgaaagagactcctttgttcccatttggtcatggacttagttatactacattcaaatatggaaagttaaaaatgaatgatgataaaattgctgccggtcaaaatctgaacctggtgattcctgtaactaatacagggagtcgggatggagatgaagtggtacaggtttatctcaaaaaaatggatgatacagagggaccggttaaaacgttgcgtgcttttaagcgtgtgcgtattccggcaggaaagacggttgaggttaaattttctttgaatgatacccagttggaatggtgggatgaacagagcaatacaatgagagtttgcccgggaaattatactgttatgataggaggtacttcctgtgagaagagtttattatcacggacatttaccattcggtaaaattatgaggagatgatagctgaaatattcaactatcatctcttttattttctttgtattccgaaggcgtcattcccatttgtcttttgaaacactttccgaaatatttaggatcgttgaagcctgtcatgtaagccacttgtgaaaagttatattctccgctgtctattaattgtacggcacgtttaatcctaatttcgcgtatgaagtccacgggagacagaccgatgatggattttagtttctgatagaagacagaacgtcctaaattcagtaactgggcaaattcgtcgactgtaagttccgagttttccatttgctcttccattacttgcatcacttgctgcatgaactgctcatcgtatgaaatgatctgaggttgcgagggggtcagtttctcttccagagtggtttcctgggtattgtttaatttttccgaccatgctttccagtagatttcctgcaattctttacgctggtgaagcaaagacttgatacgaatttttagatacgttgcactaaagggcttggtgatataatcgtctatcccttgttccagtcctgatatgcgatcatccagcgatgatttggcagaaagcagaatgataggtatgtgacatatttctctgttctccttaatattctttaccatatcaaggccatccatagcaggcatcataatgtcactgataatcagatcgggaatatattcccgggcttggttcaatccttcttgtccattggtggcggtgagtacccgataactttctgacaagatatctgataagaagtttcttagctctacgttatcttcgacaattaagatggatacagggtcttcttcattcgatatctgatttggttctttggctgtctctgaaggagtaatgtcggccattgaagctatttcaaccatgggtcttatttcatttttcttttcagcggggactgaatttccgtcattcaatataaactctgtattttctcttccctcataaactttttgattcattggtaatataacggtaaactcgctgcctacaccgggttgactttttacttcaatgttgccacaatgtagttctatcagttctttgacaagtgatagtcctatacctgacgagggttgcaatatgttgaattttaccaatgtttcaaagcgttggaaaagtgtttgctgtttttgaagatcgataccaatgccttcgtcttttatggaaacaattaatctgctactttccacattggcaatgacggtaatagacttattggccggagtgtatttgaatgcattggatagcaaattaaaaatgattttttcaaacttatcctgatcgatccaggtttctatagcttcctggtttgtttccaattggtaattgatattcttttcttcagcaataaggcggaagttgtccattactttttgtaataggctgaggacgtctgtcttttccagcagcactttcatttttttattctctattttccggaaatccaatatctggtttactaaatgcaacatacgctccgtattcttgtgcactagggttaaatgtttacgtgcattggttgtgagagtttcgtgttccagaatttcgctaaccggactggctatgagtgttaacggagtacgtaattcatgcgaaatatcggtgaaaaagcgcaattttatatttgccagttgttgttcaatatttatctgatgacgtaaccggtatatgtagagaatgatatagacgatagttgctgtggataacacgaataatacgacatacagaatccatgcccagtatgtctcccaaaaggttggaagtacagttataggcaggatacgtgctttttccatccatactccgtcgctgttggtagaacgtatttgcaattcatattctcccggaggaaggttgatatagctggctgaacggctgttatccacttcattccatttttcttccaatcctttcagacggtaagcatagctgattgattcaggcgctacataatccaaagctgcaaattgaaaagtaacattgcgttcggatggtttcagccttagttcttccagatcattgatatctaaatcctgggaggttccttgtattttaaatccggtgaatacaatgggaggggcataattacttttctgaagatgttcaggactaattttgagtattccgatatctgttcctaatagcaattgattattttccagcacaggagccgcttctgtaaagtaaagctcttgttgcatgtactttttatcataatattcaaatgtttccttttccggattgaaacgggtaagtgcattttccgaaattacccataaacttccttctttatcttctatcatagactggacgaggtcggatggtaagccatcttttgtcgtataaggtttaaattcgatgtgttcacttaaaagattttcagaaaggactttattgattcctccggtaaatgtaaggatgtaagttatatttctgctatctgtgtagacataggtcacatcattgctactgaggctggatacttcatctgggtggcgtagattcctatagaaacagatatcttccggttgcttaaattcactggagaaagtcaacaagccctccgtagtgcagacaagaatggcattattaacttcagtgatatagcgtactttggtaaaatggcctttagggtattccttcagctgattcccattatgtacgaagcgaatttctccttcggctgtttcctccaataaatttaggcctccaccataacaacctatccagattcgtttctggtggtcctgataaatactgtaaatgctattattgcttaaactatactgattgtctttctgatgagtaaattgatgtatttgaaaatgatctttctggtctcttgttaaccgaaaaagaccatccagtttacttcccatccagatgattccattttcatcttccataaaacaatagatattcttttggaaagaaatgggctgtgaactgatgttaccttcgggagttagatatcctttcaaccttccatccggttgataaattcgtatatatccttttttgctggctgtccaaagctcattttttttatctataaggaaagcgcgtgtctcaaaaccggcatccatagcttgcagggagcatgcatatgtagaaaatgaaatttttgtaacatcccagtgattgcatatccagagattgccctgttgatctaaaaaagaattcagaataacgggggtgaattttgtattaggattattgtaatcagtatagtaaggtttcagctgtttctcttttcggtcataataggagaagccacctctgtgtgggaccatccagagtgttccttgcctatcttcgaatatcaggtcgcggcttaggcgttcggccttcggtaagtcttctttgggagttatataatgttgtttctcttctgtttctaaattatatcgcactactccggacatttcagagtatagccataattctccgaaactatctttgaatacagataaaacttcggtggagggattagcaggagtacggggatctattaaccgatatctttgatcttctgcaaagtaaatataaagcccattatttgtgcagagtcctatgctgtcttttcccagtctattgatggaattgatcgtattggaggttgaaaagggcatttcatgaaactgaagttgctgtgtctggggtagatatatcactaattggttgttagcagataccagatatatattgccattatcttctttgatattcttgaatgggatatcagattctattttctttttgccaatgattgagattcctttgttggttaatatccactcatcaccatcgctatcttgaaagatggtgattatttgatctccttttaaattcttctcttctatgttatataaagtaattcctttcctttcatggggcttgtatatttgttcatcgatgcggaacgccccacgattacatacaatccaactgatacctttaggcaaggtatagatattctgtacagcgtaactttgatgtctctgatcttcataggggcgtaatatgtctatgaatctttcccggcggctatcgaatagataaactcgctcgtcataagtttgacaccagatatcacacgtttgtgtctgtgtgattttggcaaaacggttactggttaaagtacatccgtctcccggaaatgctttataattcttgaaagtgtacccatcgaatttatttaagccattccaagtggaaaaccaaataaacccttttgaatcttgcaggatattggtaacagacctttgtgccaatccgttgtaagcagagaaacgttgaatttggcaaatcggttgtgcaatggctacacaagggataaaaagacaaatcaatattaaataattgatttgtagtataatgcactttttcatagtattgactaatttgtaactgctttgcaaagatataaattatctgttttactactatgtattctgaagttaaatgtagtgtgtttcgactatgtctgataaatgagtttatcgattaacttctgttggaattacagggtgttgagcattagaatatttttcttaaatagacaataatcattttttataatagaaaactttatgtgtaattattggctgagcatgtagaatatctgtttcttttatgggatttatatacttcaaattctatttaatatctgttttaaagcattgtgtgggctcgtttccacctattgcgataaattttccccctttgctttactaccttttctgatttttgcaacaaatatcaaaagatactcataatatgaaaaacgcacaatttgtatttctttatttttcgatatgcgcaccgaatcgttttagttacttgtcacaagaaactgaaagtaccgctttgatagtccccccttcaatggagattatgaactagctgatctctgaataaaatagtaaactatgtagagaaaataattttattgtttaaccaaatgttctattcctcaaatccgcaactaagcccttcaacgtccttcttgcgtgtacaagtcctctcattactgaattggcagataaattgaggcagaaacacccaaatcagcctacaatatccccttaccccacaatgcgacttgaggcaatacgcagtatcatacccataagttgtaggcgttatccaaaatctgtctgaaatacatccgcgtaagcattgttacaggtatagatattcagcacataccgccttgatgtcctggtccactttgctggtacagagacatacctgaagacaaacgcttttatgcggcttgttgcattgagtccgaacctctttacgtcaagtctgtggataatggccttgtagaagttacgaacaagtgctgtaagaagaaggaacacggtgttctctgccatgaaggatttgggcaatctgtcccacccaaaaccattgttcatatcatcgaagattcgttcctttcctccacgaaggttatagaactcgacaatctctcttacggaagattcatagtcgttagtcaggatacaacggtatgtgtattctccttcccaaagatcctgcacaccatccatccgtttctgtctttgaatcacgagtcggtatgctttacccttccacttatcaacaaggattgagttcaattcgaactcaatgccattgatttcctcagttttccaacctctgagagcaaagatgtcattatagagcgaactgcagcggttagcacggatatagaaggatttgcagtgttcctctacttcttctacgatttcctcggaacacgatccacaatcagctctgaaacgattgatagtaaggccgttctgttcaaatctctcaaagaatctcttcagcgtgtccttctgatgaaaacggacatttgtgttgccatcgctattctctatgccgacaatcaagtcgccaataatcgccacgccagggcgatagccaaggaacttcttgtatgtaggcttggcatcatacttctctgtctctatgaactgatggtcgaaatcaacatcatacatctcaccctccttcagttggtcagatgcaaacatacaattgagcagtaaagtattgagagtgtcagccgtgttgaaatcgtagttctttcccatatctgatgtgtatgagatgttttcttgcgtcagctcctttatcgctctgaggatagtgtcagaactacaagtacgaagtgtcggatgaagtgagagatggttcatcaaatgagtagtgacatcctcaatacatgagccaccacagaagtagatactcatgagagaacggatgatttcgctgtactgataaccgaacgatctacaccttagaccgagggtcgagtcgattacagatgacaatgtggagtcaaattgctccatgattgaaaatattcctccaaaaggagtgagtttctcagatttaatttgtatttttgccatgcctgatgaggttttgtttgattattatagcaacactaaattaagtgaatcctctgacatggcaaaatcctgggcaactttttgttgctcaggtacttaaaaagtttaagttataatagtgttgcggaattaaggctattatgaaacaaaatgtaaaaagtatgaaaaacaggcttctcctcttgctggtactactctcattcgtacctattggggtgtttgcccaaaacattactgtcaaaggtaccgtcctagactcacaaggagagacaattatcggtgctactgtaacagaaaaaggtaagacttccaatggtgtaatcactgatttggaggggcgtttttctttgaatgttcccaaagggaaaaaaattgtagtctcctatgttggtatggaaacccaagaagttgatgctgtttccggtaaagatttgaaaataacaatgagggatgatgcacagtcacttgatgaagttgttgttcttggttatggaagtaaggcaagaaaggatttaacaggttctgtaggctcaatatcaggtgctaaattagcagcagtaccagtggcgtccgcggccgaggctttgcagggcaaaattgccggtgtgcaggttactactattgacggcgctccaggagcggaaattaatattcgtgttcgtgggggtacgtcagtgactcaaagtaatcagccgctgtatattgtagatggttttcaggctgacaatattaatgatattccaccgactgacattcaatctattgatgttttgaaagatgcttctttgactgcgatttatggcgcaaagggtggtaatggtgtagtcatcgttacaacgaaatcagctcaacaaggtaagatgaaagtggaatttaatgcgtatgcgcagatgcgtactttggctcgtaagttagatttacttgatacctatgaatttgtacgctatcagttggataatgttatcaacaacaactcggatctgtataaatggcgtggtaactttggtaatccaaaggatattgacctttataagaatagaggaacaaatgattggcaagatgagattatgggggggcacccaatgagttatatgtataatgtaactcttaatggtggtagcgaaaagttacgttttaatacttctattactcatcacgatgaaaatggaattttgatggggtcaggtgttcgtcgcactaatgtaaacattaagataaatgctcaactttctcctaaattgaaattgttaataaatccccgtattagtgttcgtcgtgatatgggagccggtgctgataacgtaggtaaaggcggcatcataaatgtgttgcgatatcgccctactaatgggttacgcgaatttactcacaaagctcctgaaactattgatgctgatgaagaaaaatattttgaatataccaatccgagaggagatattgatcagaactttgaactaaaacactcttggagtttcacaaatcaggcttctttggagtggactccaattaaagggttggtattgcgttcggatctggctcaatttatgtcattttcagataataatcgcttttatggttatctaactgatactggtgtgaaaaataacaacttaccagtggcggaaataacagacggacgttctgatcaatatacttggactaatacaatctcttatggactctcattgaaagaaatgcataacatttcagttctgatgggacaagaagttcagcataggcaaaataaatcaaattttagcagtgcccgttattttccaaaggagattttgccgcgccgcgctttaaataatatggcattgggtgaaacgtttaagactacctctagtataagttctccagaacgtacagcttcattctttggacaggctagctataattacgatcacaaatatctattatcggcaacattccgtgctgacggttctacaaaatttgctcccggtaatcagtggggctttttccctgctatatccggtgcgtgggtcttgagccgtgaaccatggttagaaaacaatgctattatcagtaatttgaagttgcgtgctgctattggtatggctggaaataatcgtattacggatgatatgtggcgttaccaatacgtggttaatgctactggaggtccaggctttggcgagtcaaagattaatggagaaccattttatgtaaattcaggtggaggcacttttccgaatactaaaataaaatgggaaaccactattacccgtaatgtggctattgatttaggtttatttggcgaacgtttgactattactcctgaattctactggaacacgactcgtgacttgctttataaaagcccgattcctagtactacaggttatagtgaacagatgcagaacataggtcaggttacaaataaaggatttgaactgaccatcaatggaactattattcaaaagaaagatttcttgttaagtgctaattttacttttggtctgaataagtctcgtgttgataaattaaataatacagatgatgtgctttggactcattccagtcgttggaaaggtgcagatgacgattattgtttgaaggtaggggatcaactcggtttgatttatggctatgtttatgatggtatttatggctttgatgagtttgatcgtacaacaactgcgaattatactccgaaattagatgaaaatggtaaccaaattcctgtaaattgtgatgctttgtttggtactgctcctggtcgtccaaagtttaaaaatatagttgatcatgcaaatggccgtgaagacgatgttaatattgtagatgctaatgatcgtgtagtaattggtaacactaaccctgactttaccggtggatttggtttcagtggtcagtggaaagattttgattttacctgtaactttaattatatggttggctttgatgtaaacaatgctacagcttatacactgtcatcttcaaaagacaacaagaataattattttaatgttttatctgatttcaaagcaggtaaccgttgggtctatacgaatgagcttggtgaacgtattttggcaaattcagtactttcgtcttatattgatcgatattatgaaccattgaatgcgaatgctactctttggaatcccaaagatataggtaagaatgttacccattcttattttatagaggacggttcgtttcttcgtttgcaggatgtgactgttggatatactttaccgaaaaatatttcccgcaaatttggggttgagcgcttgcgtgtttattttacaggttccaatctttggttgttgacaggctatagtggctatgacccggaagtagatgtacaaaccggtttaactcccggtatggactataatcgctatccgcgtagccgtaattttctgttcggcttgaatctttcattctaacctaaaaaatactaagatatgatgaataagataaaattaatattaggtactctgttcctcgttagcttgagttcttgtgatgatttccttgatgtcagctctgattctaaatttgatgatagctatgtgtttgggactaaagaggaaattaatcgtgcgctaaacactgtttatgcatatatactgtctggcaatacttatggtggtaagttctacacgacatatgctttgaataatgatgtggaatttacaacaaacagtagttatattcaaaatacgagtggcaatgagtataagcagtttgatgcgactcaaaatggtggtgatctgaatagtacatggagtgatgcttatagatgcatagaatatgcgaacaattttataataggtgctgagaatactgagctgtatgctcaacgtgatacaacaatcctgcagcaggtaggtgaggcaaaatgcctgcgtgcaatgaattatcatgatatggtggtattgtttggtgatattccttttagtttgaaacgttcttatgatatgggtgataacctagtgatgccattagctgaccgtgactctattttatcggttttgattgatgatttgcgaactgtcgctccagatatgcgttttgctcgcgatttatctgaaggggtagagcgggcctcaaaagagttttgctggtcgttgatagctcgcatggcaatgactcgtgcggggtattctttgcgtccggataaaggtaatccaatggcaaaaggtacaatggaacgtgcttcagactatcgtgattattatgacattgctcgtcagtattgtgattctgtcatttcttcaggtacccacaacttgactaaagcgtttaataaggtttttattgatgaatgtaattatgtggtgactaataatgatgatcccatttttgagattccttttctgaaagaaggaagtggcagtgtgggctatagctggggacctaaagggaatgtacaagatgacgtaaccactgggataaatatatggggaaaatcagatggcggagtccgtctgaatgctttttatcgctatagtttcgatcgtaatgatttgcgtttgggctattctgtaggcatgtggtattatgatcatgatggtactcctgtcgttcttaatgattataatacccattgtaacaaatggtccaaattttggacggaagcaggaaatgcccaaggcaaagaaagcgcaggtaacactggtattaatttcccatacatgcgttatgccgatgtattactaatgtatgccgaagctgtgaatgagctggaaggaggagtgacaggacctaatggtgccaaagcaattgaagcctttaaacaagttcgaaatcgtgcatttgcttttgaggatcgttcggaaaaagtagatgcttatatagcagctaatacttcaaaggacgatttctttaaaatattgatgaatgaacgtaaatgggagttcggcggtgaaaatatgcgttggaaggatttggttcgttggaataaatattcagaagttgttcgtgatgttttctacgaatattatggcatggcctcttatgttggtggtgacaatacttataatgatgaagatcaatttagctctatacctttacagttattttggcaagttgtacctaatccgaataatgtggatatgtatccgaacaagacgttgaatatattggacttttacaatctatggggaattgcgactaatcccggtacaccttggcaaatggctgaaatgtgccaatggtatgatgatggagctagtgctcctaaagcgcagtgccgctattctcttcgcggctatattcaagctgatgagtttggaaatatcaccccggatttatttggggtaccggtagagaatttgcctgtagtacgttatatattgccattcccagcttctgttattcaacgaagtgccggtgcttatcaaaattactacggttataactaattaaaaatgaaatgttatgataaagactaaatttaatatcttgttttgggcattctttgcttgcttagtatgcttttcgtgcagggatgatgatgatactttgagtgaaggtggcaatcttgaacgcgaacctatggcgctgtttcgctcagaaagaaatggtatcagcacttctgaccgtcacctctgcagtgtatctggtgtgaatgatattcaattgtattggtacggtgtgaatggctgtgccggttatcatcttaaagccgtcattcaagggcgtagctttgataatccttatgatctcatagtggatacgattgtaggtcctgaagtgttaagtatgaaagtggaagatttgcagtatcagacaggttatcgttttgctatccaagttatttctgcacgtggagaacaatacaattctgagtggttcgggataggtgatggggctcatccggatgattatttggagattacaactttggaacgttatgctgtacctgatgtgctgtgggtggatgagattactaaaaattcaatgcggatttattttaacctgctttcaaatggcgaatataaagaacattttgaagaggaaggcggcaaatatataatggatcagattaaggttgacccttctttagataatccaacacttccggggcaggtttttaacctgacagaagaggataaagagaggggatatattgatgtgaatgatttggtaacgaatgctgcatatattgtaaatggcttaaataataatgtgaagcgctattgggatcgtttgtacaataccaatatggtgcgtatgaaaggggatttgggtgaaccaattcttatcaagcatattgttgaccctaatgatactattccgggcgctgaacttaaagcatgtcgcattgatactgtactgcagaactttatgagtgataataatctggcagaaggtacaactttcttattggaaggtggcaagacctattatttggtgaacactgtcacaatgtctaaaggctttactctgaggagtaatgatcccaacaatcctccgacagtttatttgggtgtcggctttaatgagaatggagatccccgtgcatgtaatttctcttttggacgcaatgccggtaatggagaaatggggggaattaatgtccagtctatttgctttcaggatattaatttcgactgtgagaaagcatttaatttcttgacaaaaccagcttctgcgggtgctggtttaggtaattattttattaatcagaattctcaggcaatgccgtttgcacttgaatcatttgaaattcgcaactgtagcttccgcaatatgattcgtggctggattcgttttcaaggaccaaaccgtaaattgatgaataaatttattgtagataattgtatgttctatgattgtggaatatatgacaataacggtcgtggatattcttgggtggcaggtgatggaagaaatgccaatacaaacctttttaaggatttctcaatgactaactgtacttttgtagatagcccacgtcatgctttgctttcagaaaatgctaatttagcttggcctgcctctacggtatggcatatccgtgtggagaacaatactttcataaactttagtactcgctctaaagaccgtttgatttttgaaatgcgatatgcaccgtctaatagtactattatttgtaaaaagaatctgtttgttatgacgcgtgccggtaatgatgattctcgtactttgtatcaggctgggatggatatccgtcaatttaatggcttgcagtttgattttgatgataactattctaccttgcgtcctaatgtcagttcacataaaattgacgagttatttaccagttatggtttcagcgctacgaatcgtggtgcagcttttaataatggtaagcagaatgtaggcggtattgaagctactaagattaagattggcgaagatggtggtatagaagctactgacttgtttcaaaatccgattccattaggtaaacaaggtgacaaaaatatgcatcagtataagcttgatggattttactataagaatacagataaagttcgcaatagtgaaatttacaagaaaggaattggtgacccgaggtggtctgtaaatgtaatgccatagtaggtattattgctataacgtgtcattaatgagatcgtgagattttgttaggcattctttgcagaggaggttgtgtcaaaatgctggcacaccctctttttatgcgcaaagcccagactttctcaagcccgggctttgttattacccaaaatttttgtaactttaggcataaagtttttcgttatggcaaagttacattttcgtccttacattcccaaccaaaccgttctttttccacaaagaattgatgaaaacatagctgcggacgatcctgtccgcatagtcaatgcagttgttgataatcttaatcttgataatttcaagaagctttataaagaagcggggcgctcagcttatcatcctaaaatgatgcttaaggtaattatctacgcttacatgaataatatctattcctgccgtaaaatagagaagcttcttttgcgtgatatccattatatctggcttgccggtcatgagcatccggatttcataaccatcaaccgtttccgtaaccgtgtaaaggaggagataaacaacgtcttcacgcagttggttcttgtcctagctgacaagggtttcatcagtcttgacgtagagtatatcgacggcaccaagattgagtccaaggccaacaaatatacttttgtctggcgcaaaacagtcgaaaagaaccgtacaaggttgctgaataagattcgcatccttctggagcaggtggatgaagccattgtgcaggagaactctgtaaaagacacatccgtggagttgactcccgccatgctctctaatatagtggatgaactcaaagaagtgctggaacaacagcctgcaacacaggacaaggaacaaaagaaagctctgcgtgaaaaaaagaaacaggtcagagaacttgaagggtatcgtgacaagctgatggaatacgacaatcaccttgaagtccttggagaacgtaattcctattccaagaccgatcctgatgccacattcatgcgtatgaaagaagacgccatgaagaacgggcagaccaagcccgggtataatttacaaacaggcactgaaaaccagttcatcatagacttccggctgtttcccaaccccaccgatacgctgaccctgatccctttcttccactccttccagcaccgctataaccgcttaccgggtatcggtgtggcagactccggttacggctcggaagaaaattaccggttcatgcaggaaaacgggatagaggcctttgtcaagtacaactacttccataaagagcagcgtccccgttatactcccaacccgttccatgcggaaagtctccattacaatgcgggggaggattattacgtttgtacgatggggcaacacatgaaccgcataggaaccagacgtgacaaaacagcgagcggatacatcaccgaaagtgcccggtacaaagcacaaagatgcgaaggctgtcctttgcgtggaagttgttttaaagcacaggggaaccgtattatagaagtcaaccaccggttaaaccaatataaacggcaggcacgggaaaggttactctcagaagaaggaatcaggcatagaggcaggcggtgtatagaaccggaagctgttttcggacaaatgaaatacaacatggcatacaggaggttccggcatgtgggagaagacaaggtgacaatggactttgccttctttgccatagcttttaatatcaaaaagatgtgtgcaagactgagaaaagcaggaaaggagttcattacacttgctaaatctatatttattgggctatttataactcgatacaacgggaatatagcaacttgttaccaaatgaatgagaaaaaagcggcgtagacaaaaggaaatatagcaggactgtaaatcatcaaaaaaggttgtgccaacgttttgacacaacctctttttgctggttattaatgaaaaatatttggtaaatgttcctattttagatgaaatagagagttgatctattttttatcctttcgtttttcatcagttaagtttttgagtcccatccttgatggaagtcctaaaagagagatgtgctataaaggagatatcatttatttgtgtcttgattttttttatattgatttctcttgatttaattgtcaaacagtgctttcaaggaagtgcctgaagatactaaaacaaaatccaacttactaattattattttgtttagttagttggattttgtttaaggaatattcctatttgttctgaaactctgaaggacttactccatatctctttttgaaacatttgctaaaatatttaggatcattgaatcctgtcatataagctattgtagaaacgttatattctccactttcggccaattgtttagcacgtttaatacgcatttcccgaacaaaatcaataggtgaaagaccagttaggctttttaatttctggtaaaatacagtacgccccattcctaatttcttggcaaattcatcaattatgaaatctgaattatccatttgattattcattatttccattacacgcttcatgaattcttcatcaaaagaagtaatctggggaggtgttggttctatatcggcgatgggtacaggagtcttttttaatgtttttgaccactgttttaaataaagctcttgtagctgtttgcgttgttgaagtagatacttgatgcgtattttcaggtaggtggagctgaacggtttggtgatataatcgtcaataccatgttctagacctgaaatacgatcgtccaaagaagatttggcggaaagtaggattataggaatatggcaaatatctcgttgctcttttatagctttcaccatgtccaagccatccataacgggcatcatcacatcactgataataaagtctggtatatattggagagcctgttccaagccttcttgtccattggtggcttcaatgactttataggttccggaaagaatatcattcagaaaacttctcaactctgtgttatcctctattattaatacagagatgaattcttcgtctgttttatcatcgacgtcgcagtatgctatattttcttgaagaatattttttttctctggaatgggaaaaatagctttgtgcttgctgtctttctggttgtgagtagatggaatatcactcaggataaactccgcgttttcttttccttcatagaccttttggtcaagtggtaatgttacaatgaactcactacctattccagtttcagtatttacttggatattaccctgatgtaattcaatcaattctttaactaaggacagcccaatacctgaagatggctgcagaatattgttatttactaatgtttcaaaacgttggaatagtgtctgttgcttctttgggtcaataccgataccttcgtcggcaacggaaataacaactttatcttttgtcgtatgggcatacactgtaattgatttattagcaggtgtgtatttgaatgcattagacaataaattaaaaataattttttcgactttatcctgatctatccagcaatgtattgactctttatctgtttgcaggcggaaattaatatttttttcttcggctatgaggcggaaattatccattactttctgcaatagttctacaatatctgttttctctagcaatagcttcatctttttgttttctattttacggaaatcgagtatctggttgaccagtcgcaacatgcgctctgtattgttgtgaactactgtcagaagtttacgggcactgggagtgagagactcatgttcaagaacttcacctacagggctagtaatcagagttaaaggtgtgcgtaattcatgagagatatccgtgaagaatcgtaactttacatttgctaattgttgttccatataaatctgatggcgtaatttgtagatgtataatatgatataaacaatagtggacgtaaaaagaatgaatgaaatgatgtagaataatatagcccaggatgtttcccaaaatgtaggagtcacgttgacagaaagttttcgtatattatctgtccacacaccgtcactattggttgagcgtatctgtagttcataatttcccggaggaagattaatataactggccgtgcggctattctccacttcattccatttttcttccagcccctttaaccggtaggcgtagctgatggaagtcggattaatatagtctaatgcagcaaacaggaaagatacgtttcgctcgtcaggttttaattttaattcttcgaggtcgtcaagatctagctgttgctgaactccttgtatttttaaactagtaaatacaatagggggagtataggagcttttactgaaggcagttggatttatctttaaaatccctgcatctgtacctaatattaactgattctgtaatatagcgggtgaggcttcactgaaatatatttctttttgcagatgcttttcgttataatgttcgaaggttccgttttccggatcaaatttggctaatgtgttttctgatatgacccatagatttctctgttgatcttcaatcatggatagaaccaggtccgacactaaaccatttcgtttggtataggtcttaaattggatatgatcggttaataaattatctgaaataatctgattgatgccgccggtgaatgtaagtacatatgaatttttatggctgtctgtataaatataaatcacatcgttgctactaaggctggatgccaaatccggtatgcgtacattgtcatagaacttaatgtcttccgggcgctcaaaattgcaagagaaggtaatcaggccttcggttgtaccgactaaaagggcattattcacttctttgatgacacgtactttattaaatttatcttttgaataacctttcagtaaattaccgttatgcaggaagcggatttttccatttgccgtttcctgaagtaggttaatacctccgccgtgagtggctatccacatccgttttttagaatcttgatatatgcaataaacactattattacttaaactataggggtcttcttccttatgtacatagtttcttatctggaagcttccgtctcttttgggacttaatcggatgataccgtcccatttactacccatccatatgtttccctgttcgtcttctgtgaaacaataaatgtttctggagaacgaaatggcttttggactgataattccttccggtgtcaggtagcctttaagagttttatccggattgaaaatccggatgactccttttttgtttgcaacccagagattttgttgcttatcgaccatgattgctcgggtttcatgtccggaatcaaaagtggtcaattggctggcattaggaaaaaatgaaattttatccatccagaaattattagcataccagaagttcttttgattatctacatagaaatttaggataaccggagtgaatttagattcaggtttactataatcggtgtaatagggctttagttctttatcttcccggtcataatagcttaggcaccccaggtgaggtacaacccataaagttccctggctatcttcgaatatgacgtcacgacttctaagttcagccttgggcatattttgtgtaggggtttcatagtgctgctgctcgttagccaatggatcataccgtacaattccacgttgttcttttgagaataaccataattcattatggctgtcctcaaataatctcataacgttaaaatgcatttctacattcctgaattgtttgctttttgcaaagaaaagtatgataccattgttggtacctattccgatagtatcttttcccaaacttagcatacagtttagtcgcgaatagttcaaaggtatttcttcatattgaacttgtttgttttgttgattatagattgctaaacgtttgcttgatatcagatacattttctcattgttttcacagaaacttgtgaaatgggttttatcagatattgttttttgcccaactatacaaacgcttttatctgtaaaaatccattcatcgccgtcagcatcttgttcgattctggaaatttttctaccgggtaggttgccgatttctggagtataaggtgttatggcaccctcatcctcattttctaatttccgttcgtctacccgaaaagctccgtgatcgcatacgatccaactgactcctttagataaggcatagattttgcgtactatataagtttctccacttttttgttcaaaaggttggagaatatcgatgaatttttcctgatgactttcgaatagataaacccgggcgtcataagtctgacaccagatgttattttgttggtcgggtacaattcttaatatacggttactcgttagtgtacatccatctccgggatatgctttataatttttgaaggtataaccgtcatatctgttcaagccattccaggtggagaaccagatgaatcccttggagtcctgtacaatgtctgaaacggttctttgtaccaatccgttatatatagagaaatgctggatttgacaaattggttgtgcaagaagcatggttgggattagcagtaccatgtagattaataaatgtaaaatctgttgtgctatgtttttcatttgatattaatttgtaaaacacacaaagatataaaaaaatggcgaatttcttaatcttctttaaaatagatattgtgaatgtcttttttattaaatgaagtaatatatttgtgatatcaaaatgatatcaacttaatctatcagttatggaaacaaaagaattgaatttcaaagggtttaagatgaatggctttttaggattgtttgttcatctcattgtgttacctgcactaattttctttggctttattacgtgtgtgccaactgcaattgtgtctggtattctctgcattgtctggctgataatgtttgccggttatatgcaattggaaccgaatgaggcccgggctatggtgttttttggtaagtacaaaggtacattcaaggaaactggtttcttttgggtgaatccttttctggataagaagaaactttctcttcgtgcacgtaatttggatgtggaacctattaaggtaaatgataagatcggtaatcctattctgataggtttggtgttggtatggaaacttaaagatacctacaaagctatgtttgagattgattcgcagacaatggcttcatctgcccatacggggggaaatgctaaccaaattaatataggtaatgcggttgccagccgtatgaacgcttttgagaattttgtgaaaatacaaagtgatgccgctttacgccaggtggcagggcaatatgcttatgatgataacgaagcggatactgaagaactgacacttcgctccggcggtgaagaaatcaatgaacagttggaacagaagttgaatgaacgtcttgccatggcaggtatggaggtagtggaagcacgcattaactatctggcttatgctcctgaaattgctgcggtaatgctccgtcgtcaacaggcttcggctatcattactgcccgtgaaaagattgttgagggagctgtttctatggtaaaaatggcgttgcacaaactttcagaagaacaaattgttgaactggacgaagaaaaaaaggcggctatggtcagcaatttgctggtggtactttgtgccgatgaggcagcacagccaattgttaatgcgggtacgttaaatcattaatcaagataatatgagcttttcttttttatataagtgggcattggtgcttggcttattgctgggacatgtagtgacggtttttgctcaggatgcaaatatggaccgtgcgaagcatgtgtacgaattgtttgtggcagatcagggggacagtattcatgctctcttgaataaaaatctgcaggaaaaattatcaccggaaatttttaaggacatgtttaagcaatcggaaaagcagttcggaaaacttcaagcaaaaggagagtggaagcaagagagtgctgaaggcataacactttattatcgcgatctgaagtttgagcgttacagtctccgttttttgttgtctttcgatgctgatggaagcatgaataccattcgtttgatgcctgtacctgctgcttctacagcaaaaccggtagcttataataaagagaaaatgcaggaacgagatataacggtgggagcagatgactttaaattgcccggaacgctgacgctgcctgtaggaaagaaaaaggctcctgtcgtaatccttgtgcatggttccggtccgcaggatcgtgatgaaactgttggtccgaataaacctttccgtgatttggcttggggattggcggaacgtggcattgcaacggttcgttatgataaacgtacgaaggtatatggtgcagcgtgtgtgccggaaggtcggaatatcgattatgatacagaaagtgtagatgatgctgtggctattattgcttgggcgaaggaattgcctgaggttgatgcggacagtgtttatgtgctgggacatagtttaggggctacacttgctcctcgcattgcagagcaagcagatgggttgacaggaattatccttgttgccgctttagctcatccatttgaagatgctattgttgaacaaatgacctatatatcttctctgactgactcttccgctaatgccaaaaagcagattacagaaataaaaaaacaagctgataatataaagaaactgggtacaccggaatatgatgataagattcctttgttgttgaatcttcctcgttcttactgggaatttgctaacgcctataaaccggtagaagtagcatctaaactggctcttcccatacttatattgcagggcgagcgtgattatcaggtgactatgcaggatttcggtttatggcgcttcgggctgatgcgtaataaaaatgctttctttaaatcttaccctaaacttaatcatatgttacaggaaggtagtggtaaagctactccgtttgaatataaccaggcgtcgcctgtagtcggatatgtcatggatgatattgcatcgtttattcataacggaaacctgttataatacaaattcaattgtaaattgttaaatagtaaatagaatcgtggctaaaaaagaaacttcaaccaaaagctttgttctgcgtgtagatgctgcaactatggatgccattgaaaagtgggcagccgatgagtttcgtagcactaacggacagcttcagtggattatcgctgaggcattgcggaaaagcgggcggatgaagaaaacaaagaatactcctccgcctaaagaacctgagtcgtagtttagcgataagttgttagtgataagtgattagtagtttgaattataattcatatattgtttatgttaaatcttggtccatattcaactaaagagtttcctaatatccgggtatatcccactataatagatcgtatattagaaggtgttgccgtattgttggcaattgctgcctgggtgtgtgcaatatgggtgtatatccatatagaggacaagattacagctaatttctcctttatggctgcgggattaggtactttatgtctccttttagttggtatttctgcctatcttcctattcgttggatacgttttcctgtacgtatcacagaacgcaatgtcgcggtacagtattttatggcagcccgtattgctcgtatattgaatgtgtttcttactttacttttcctaactcttgtttttaataaagtagagatgggatatggtattccgcaagatctatgtaatatgattacgagtgcggtcgttggtttgatgatattggcgcttatagtctattatatattggcgtttaagtataaatagaggtatttacaagcattaatacctagttatgactattaccacctttcattataccttgttttagggattgtgacatcttcgcaaatgccctacttttgcaacatcagatttaatgaattagttagtcataattacgtaaccacttttattaaggaaaaaaggttcccgtcttccccgatgtgatatcgtgaaagagcggggattttttcatttaataccctgtctacaagaagttaagagtttgtcaacaagaagttaactccttgcagacaggaagttaacttcttgtaattatttgataatcagtgatactcttgatttgccttgttggtgaatacaagcaaataggaacggagttgaagttaaaagtaaaaggagaaagattgtgtttttattgtattatgcgggatatccatagttggaaatgaaagacagtgtgaggcgatgctctctctcttttataggttatctttaatatcctgcagttccaccagtttgtttacgatagcgtaaatggtcaggccggccggagaatgtatttgcagtttacgggcaatattccggcggtgggtgataactgtgtggatggaaagatagagctggtcggcaatggctttattggtcatacctttcacaacgcaggtgataatttccttttcacgctgactgagcgtctcctgctcattttctttctcctcttcttcgtcagtgcaaagcagttggtttattttggtggcaattgtttccggatcatcacaaatagaaagatgatcatcatattctttcagtgagttactgtcaatgacagaacataccagtgccagatatttggtttccactttcccattttctgccttgaatgctgggagattgaaccagccgccaaaggtcgggttaacaatcaatacatccggtgtatgcaggtgaatatagctttgcaaagattccggagaggaaacctctataggtactacattcagattgggcaggcgcttcagcactgttgtgagtccgcttcggataatgacagaagtttcagcgactgcaatctttacagaaacattattgttcatttttcattctcctttccagttgtgccacggcgggaacaaacatatagtcttctacttggcagtgtgaagcaaggtcatgctcacagttgaagatatcgaaaagaacagcattaagcttgttgttgttctctttttccggataatacttaatgataatatttttcagttctgtcagcttggattcaatctgattatgcttactggcaaaggttgctatatcatagttctctgcaagtttgccttcaagtagtttttcgacataggtgaacacagcctcgttttcatattccatgtggcggcgtacctctttggcatattcatcgaagaatttcagaatgagataggcaatattatccgagcccgagcaatcgatagattcgatgagcttacgacggataacaggtaatttaaaatcgagaaagtaagtgtgcgcccgtttcagataatccataagggctgagatggaaaatacgttttcctctccactataagtatattgttcttcactgatgaaattggctactgcgagaaaggtacggtagtctacgccttgtgcctcgcaaacgtcctttacactcttgtctccgaatcctaaggaaaggccgaaacggctcataaccattaataaggagtagttatcacagataaggtcgctcattttgtctgtggcgcgatacttatgcggttcattcattgcagattatcctttctttctttatttattcgtgcgcaaagtaacggattttctccgggaattgcaatcgctatatgtaggtattttgtgtttagtcttatttaacgagaaaaattagtttataaactaaatattttagttctttgcgaaaaacaaatgaagagttatgaaaggattgactgcgaaagaagaggaaatcatgggatttttctgggagaaaggtccgttgtttgtgaaggagatgctagctttctatgaagaaccgaagccgcatttcaatacgctgtctacgattgtgaggggattggaggataaaggtttcctggcacataagacttacggtaacacgtaccagtattatgctgtagtgaataaggaagacttcagtaaaggaacgctgaagaaagtaatcagtaagtacttcaataattcgtatctcagcgcagtatcatcgttggtaaaagaagaggatatttcgttggaggacctgaaacagttgattgcagaagtggagagaggagcgaaatagaaactttaaaatgccaagaattatgaaaaacatagctataacttgttttgtattgatagctgtttgcgtaggtttgcaggcgaaaaaggttgtgaaagctccttatttcatggcaacgaatactagccagatcgaattcgaaaaagtgacattgggaaaggatacgacatggatagatgctaaaatatattctattccgggcgaagatgtaaggatagactcgactgctgtattgcagataggaggaaaaacgtatgcctacctaggtggtaatggtttttcaaaagaactatggacgaagacaccggcttctggtgaactggctgtgacgttgaagtttgagccgattcctatggatacggaaagttttgactttttcgaaatgtctgagaagaaagacgaaggatggaatatttatggagtgcgtctggacggaaagaagccggaaataggaataccggagaaattgttgaatcagcaattggattattcccagcctctgccggatcctgatttgaagaatgggaagacggtgatatatgggcgtatattgggttatgatccgactcatggtattgctctgaaattcaattgtactgactggttattctttgatgttttcggtcaatccgttccggtgaccgaggatggaagttttcgctacgaaacaaatatgatgctgcccggtgaagcgacattgcgggtaggacggaagaggtttgaattgtttctgatgccgggtggtaaacttgaggtaactattaatttgccggagattttctggtcggaaagtcacctgtttggaaagaaagagaacgggcagttgatttggtttgagggtacgtatgccgctctgaataccgaactggtaaagcatgccggactgatgaacatttatagtgcggataatttttatgaaaatatttgtggtgttactccggcccaatataaaaagtatgtgacgaagatttatgaaaaaaatcgtggtgaaatactgaagaataaatcgttgagtgatgctacttgcacatacatgataaacaagctggaaatgtcgtatttctttgctatcagggggtataaagggaatattagttatgctccgatgattagcggaaagaaaggagtgaaacgtgcagacatgacggtagatgaaagttattatgatgatattctggaactggattttattcattcaccttatatacgttatggcagttatcctgattttgtacgtgctgcaactgaagattttaaaggaaagtttgaaccgcagcctgtatgggaggatattttacgggcgaaacctctaggttccactcttgctcgtttgaaaccgctgtcggaaaaacagatgctgacattggacagtatatccgaaccggaaataaagaaagctttgactgtcaaaaataaagaagtgatggacttgcttgctgaaagtgtaaataagaccggttatacagtttgccagctggatacggcagttaccgcagatagtctattggcagttgtcacccgtccttatcgtggtaaggtggttctgatagatatgtggaatacctggtgtggcccttgtatgcgggctatgaatagcttgaagccggtgaaagaagaattgaaagatgtagtgtatatttatatggcagatgaaagttcacctgaagggaagtggaaaattaccatacctgatattcatggaatacactatcggatcacgaatgagcagagttctgcattaggtaaactatatgagtatccgggaatacccacttattttgtgatagaccgggaagggaagctctcatataaagttaccggatttcccggtgcggaggtgatgaaagaagaactactgaaggctgggaaatagtagctgtaaattattaaatagtacgtcaatatgggaattttctttgtctatatactgaagtcgtcggtttgtttggcggtattctacctgttttaccgtttgttgctgagccgtgagacgtttcatcgtttcaaccgggtagcgttgttgagcatattgttgctatcttgtcttttgccattggtggaagttactgtggagaagcagacagaggttcatcaaaccatgatgacactggaacagtggctgatgctggcagatatgatgaatactacaaatgtggcggaattgcagatagaggaagtgacggtaacttggatacaggttgcattattggtgtacctggccggtattttactttttgcttttcgtaatgggtattcgttgctgaagttgggcaatttattgaggtcaggcagaaaagaagacttgagtaaatatactgacggtggtgagaaagtgactttgatagtgcacgaccacgatatagctccgttcagttggatgaaatacatcgttatttcacagaaagacttggatgagaatgggcgggaaatacttattcatgagttggctcatatacagaaccgacattcgtgggatttgctggtagcagatatctgcatctttttccagtggtttaatccggcttcgtggctgctgaaacaggaattacagaatatccatgagtatgaggcggatgaaacggtgattgaaaaaggcgttgacgcgaaacaatatcaattattattaattaaaaaagctgtcggcacaaggctctactctatggccaacagctttaatcacagtaaacttaaaaaacgtatcactatgatgttaaaagaaaaatcgaatccgtgggcaaaattgaagtatttatacatacttccggtagctgccattgcagtaactgcttttgcccgtcctgaaatctcggaaaccgcagaagagatttcaagaatgtcggatgcactcggaatggaacaagcaagcttgctcttctctcgtttgcacgacatttctgccgccaaagttaatgatttgacagcaattgtggaagcaaaagccgtaaaaactacggaagaaccagtacaggtagctccagtactgaaagatacagctaaacccgtggaggtgaagtatattcctgcagaagtgactgagaagctacagggtactcccttcttcgaggtggtggagcaaatgccggagtatccgggtggcatggctgctgcattggagtatattcagaagaatatgcgttatcctgaaactgcaaagaagaatggtacacagggacgcgttacggtgcaatttattattgataagggaggaaatgtgacggatccgaaagtgatccgtgccgtagataaagatctggatgctgaggctatccggttgataggaacgatgccgaagtggaaaccaggtatgcagaaaggacaagcggtagcagtgaagtatacactgccggtaatgttcagactggaagggggagagatgaaaagttctcgtactgtagagatgagcagacgccctggaagtttattggatagtgctttggttatagtggatggcaaggaagttacccagtctatattgaatgcaataaatgtcgacaggataatgagttttagcgtcttgaaggatgcggcttctactgcaatatatggagagagaggcaagaatggggttatattgattactttgaaagaagataaagaagaataccatccatcagaaacctatacactaaagaatactaatgatcccgtggttttgggagtgaaaggtacaggaaaatttactactgtcaatggagtgcaaggtatctatataaatagtaagaaggcaaatcgggaagatgtgaccttttttgtagatggtgtgaaaattgattccagcgttgcggacataggtgaggtagtaccggctgaaagaattgaaagcatgagcgttgagaaaggaacagacggcaaaggccagatttatatcactaccaaagacaaaagaggagttgagaagatttctgccaaaggtgatataaaagtggaaggtattgtgcaggataaagacggagaacctgtcgtaggtgctgccatactgatagaaggaacaaaaagcggcagtataaccgatgtggatggtcgctttgtcctatctgcttcaaaaggcgataaactggttgtttcttatattggcatgaaaactgctaaagtaaaggcggagccgaaggtgacagttactttgaaagatgaataatcaaagatattttatatgaaaaggaattctctctttttgtttctctctatgatgttcgtttgggtggggctttgctccgcccaaactagtagtgataagtatgttctcattgacggatgttttttcaatggtatgcctccgggaattcggactgatgaaggtgcccagatgattatgctgacagatgaggaaggacataccgcattggaaatacgtctgaatagaggcaaaactttaccggactatgcaatgaaatatcgggtttccgtagaaaaagtacccggaggagaggaattattgcggatttcccgttcaggagcgcaaaagccaatggcgattgcagcgactaatacagtaactcttgataaatgggtcggaaaaccattcccggactttaaggtaaaggatacgacgggacgggtatggacgaaggcggatatcattggaaagcctttcgttctgaactattggcacactggttgcagaccgtgtatcaaggagatgccggaactgaatgaatggatgaaaatctgtccggatgtgacttatttctctactacctggaatacagcggaacagataaagaagatagtggaaaaccgtcctttcctttttacgcatattgccgatgaattatttttcttcaatttgtttaaagtacaggtcacgccgactacattgttggtagataagaaaggtattatccgctattgggaagaaggtacaagcgagagtaaacgggcctatttgcttgatagactaaaggaattatcagtcgaataatcaactttgtttcttatttctttgtttaaatcattacttttaagtatttttgtttgagacggtttagtattctatcacttaaaagataatgctatgagacaaggaaaacaaattcaccagggatatagcttcttttggggagtatttctattattagtgatgtctgccgctatatctattcatgctgaagccccttctacaaaggagcttgtacttttcaaagatactttgaagaatgataccattgtgccgcagtctccgaagaaaaatggcacattcgttattagagatcgcattcctattccatctgatgagcctttatttatagtaaatggaatggaacttccctatgagatttttgcagcattgaaccctgcgcatattgaaagtcttgaagtcttgaaagatgcttcagctactgccatttatggcacacgtggaataaatggggtcattattctgaagttgaaaactccacaacaggtaaaggaggaaaaaaacattaagaaaatagatgattttcttaagccaaagggagtggacaggaggaatgcgcgttactatattgacggcaaagaagttccggccagtactgcgtatcaaacgagtattgagcaaatggaagtgaagaccggtgcagacggaatactggaaatttatattaaaccaatgattttcctaaggggagaatatgaataaaagtgattgtcaggagcggaatgattaaagattacggaataggaaatacctgataactaatgttgaaacaaatatccttattaatcctgtgtgcggcagcaatcgttttgttcgctactcctgtgcaggcctgtacttctgctgttgtatcgggtaaagtaacacccgacggtcgccccctgctttggaaaaaccgtgatacggactttatgcgaaaccatattgattatgtgaaaggcgagaagtataactttattgctgtagtgaatagtgccaatgcatatctgaaagaggcatggatgggaactaactctgcaggatttgctttgatgaatacacaatcgtataacctggtggatataaaaggtgatgaagaacggggagcagccaatgggcgtgttatttatcgtgcacttgaagtttgtgctacggtagcggacttctgctattttttggatactatttccaaacccagcgatatagaagctaatttcggtgtgatcgatgcacaaggcggtgcagctatgtttgaagtagattattataaatatgtgatgtatgatgccaataacccgaaggatgctccttatggttatattgcccgtactaacttctcttttgcaggtaaggtgaacgagggggccggctatgtgcgctatatggaagcagaccaggtgctgatgaaagcttcggccacaggtagcattaccccacagtttattttcaatgatttatcccgttcgttccgtaatcgtatgctggatattgatttgcgtagcggagcgtataatcgtcctcaggcatcgggttggtttgtagatcaggatttcattccgcgtagcagtacatcgtgttcggtagtggtacaaggtgtgaaaccgggtgagaaagccgaactgactaccatgtggacactgttaggttatcctcctaccggtatagctattccgttgtgggtgaaagatgccggtaaacttcttcccggaatggtacgtttcggtaaagaacatgaggcagctccgctcagtgattggtcacttcgtttggcagacagagttttcagctataagcagggaatgggtaccggacgttatctgaattgggaaagattgtatagtcctgagaaaggtgacggttatatgacagcgattactgcggtagaagatgaagtcttccgtacgacgaagccattgctggaagaatggtataaaaaaggaagcctcgatacccaagcaataccgaagctgtacgatgaactggaatcatccatcagaatgatctatcagagtttactggaatcagaatagaacttacattaccgaatggaggtacgccagtatctccgtttcttgttccggatggaaccaacggatttcttcatctctcttgaaccatgtcatctgcttgcgtgaatagatgcgggagttctgttggattttctctatggcaaaaggcaaggtccattctccgtcgagatatttgaacatctctttataacctaccgtattcaatgaattaagtgcccgataaggatatacctttctggcttcttcttccaagccatcctctatcataatctctacccgtcggttaatacgggcgtaaagttcttcccggtcgcgcgtcaatcctattttgatgatgcggaaggggcgttcttttttctgttgtgtacggaatgaggtgtaggtcttccctgtcatatagcatatctccagtgcatggattacgcgtttaggattcttcaggtctactattttgtagtattcgggatcgagtaactttagctctgcgcacaatctttccagaccttccgtttcatacttatgtagcatcacctggcgtgtttcagcatctacggtcggaatatcgtcaatgcctttgcaaacggcatccacatacatcatagagccaccggtaagcaatactgtatcctgttcggtaaataaggtttccagaagtttcagtacttccgcttcatattgggcggcactgtaataatcggtgagttgcaaggttcctacaaggtaatgtttcacgcgttgcagttgctcgggggtaggggctgccgtccctattttcaaatcggcatagagttgccgggagtctgcggaaacgatgcaagtttggtaatgctctgccagccgcaggctgagttcggtctttccgactccggtcggtccaataagcactatcagggttttcataaggaaatggtatttagagaattatttcccatctgcagataacgcggataacgcagatctcttctaggcttaagtctttcaaatctgtgttatccgcgttatctgcggatgaaaaatttaaaataatattagaacttttcttcctcgaacggcgctgcgccaccttcgcctccgcccatgtcgaaaccttcctggtcgaattcttccagatcaaagtcctgatctccatagaagttttcatccaaatcaagcgatccgctgttggctgccatttcttcgaagtcaatcgtctgtttcggagcatcaccttccttcttggtacacttggcacctttcatttcttttccggtaatgatctcggagagttcaatgaagaaacagcgttctgtcatgtagtcgaacacatagagtaacttctgcttttcatcttctatcagttcgctgatagtggtgtctttcattacccaactgtccatctccggattgtcatccatctcttccagtgtaatttccttttctttttcccaatcatcatcacagatgaagaaagaagtcatctggtcgttagtataacctactgacttcactatagcctcatggaagtcgtagaatgtagcttccgggtcaatttgtatttctcttacgaagtcgtccacttcatcggagataagtgtaaatctgtatatcatattctaattactttatcgttttatcatctaataataccacgttcggagtcacggatgaagctgacaatgtattcgatttccgggctcgtcggaatttcttcttctattttctttaatgcgtctgaagtgttcaatccactctgataaatgatacggtatgcgttgtgtatattctcaatggtttcattggagaatccgcgacgacgcaacccgataatgttgataccgctgtaagcaatcggttcccggcctgcaatgatgtacggcggaatatccttactgaaacggcaacctccttgtatcattccgtatccacctacacggcagaactgatgcatcaatacattggcactgataatggagaaatcgtctattacaatctcacctgccattttagtagagttaccaatgatacagtaattaccgacaagggcatcatgagctacgtgcacaccttccatcaacaggttgttgttaccgataatggttctgcctttggcagctgtaccgcgattgatggtaacattttcacgaatggtattgttgttaccaatttcagcggtactctcttctccctgaaatttcaggtcctgagggatggcaccgataacagctcccggaaaaatagtatttccattgccgatacgtgaaccgtacagaatgttggcatttgccataatcttgttgttatcgccgattaccacattcttgtcgatgaatacaaaaggagcaatctctacgttttccccgatttttgcctcgggatgaatatacgctaagggacttatcatgctgatttatgatttgtgatttataatttatgagatattcgcgcttattattagccacgaataaatcttaaatcataaatccttttacttgttcttaactatttgtgccataaactctgcctcgcaaaccactttctcgcctacgaacgcataacctttcatcgtggaaatgccacggcggataggtgcaagcagttctacgcggaagataagggtgtcacccggcactaccttttgacggaacttcacaccatctatcttcatgaagtaggtagagtagcgttcgggttcgtctacggagttcaatacaagcagaccgcctacctgtgccatagcttcaacctgcaacacacccggcattaccggttcctgtgggaagtgcccctggaagaaaggctcgttggcagtgatattcttcacgcctacaatataattggcacctatttcaatcaccttgtctaccaattggaatgggtaacggtgtggcaacagttcgcggatacggtttacatccatgacgggttcgcggttacagtcgtaagtcggagcctgtatatcatgcaggcggatttccttacgcatctggcgggcgaacttgttattaatggtatgtcccggacgggtagcgatgatacgtcccttgataggtttgcctatcaaagccaagtcaccgattacgtcgagcagtttgtgacgggcacattcattggcccataccagcggtttgtggttgatataacccagttgcttggcatccatgtggggaactcccatcacatcggccaacttatcgaagtcttcctgagacatttctcgttcgtagataacgatggcattgtccaaatcaccgcctttgatgagaccggcctgcaacagtggttcgatctcgcgtacgaatacgaatgtacggctgccggctacttcatctcggaatttcgacatatcctccagcgttgcaaactgattgggaatgatggtcgagtcgtaagataccagtacattcagactgaagttctcgtcgggcaacacgataatggaagaaccggtcttttcatcgcgaaactcgatttttgacttgatgatatagaaatctttaacggcattttgttcttctgtacctacgcgctctatttcttgtgcataatattgggcgctaccgtccagaatgggaaactcaggaccgttgacttgtatcaggcagttgtctatgcctaaggcgtaaagggctgccatgccgtgctctacagtgctaatcttcacaccattcttggaaaggacggtgccgcgagtggtttcagtcacattgtccgcaaccgcatcaatggtaggttgtccctccacgtcgatgcgctggattttatatccgtggttgtccggagcaggattgaaagtaacggtcaggtcaagtcccgtgtgaaggcctttaccactgagggaaaaactgtctttcagagtcttttgtttcaacatttgttacttatttatttgttgttttaattcattcagttctttacggagctggcggagttctgttagcatatccggtaggttccgttgggcaacggaggctttgaagtattgcttcaactccatgggaggagtaccgattaactggctgccatccttaatattgctgggaacaccagactgtgctccgaggttcactttgtttccaatatggatatgtcctgcaatgcctacctgaccgccgaacatacaccattcgcctactttggtagatcctgcaatacccacttgcgccgccataacggtatttgcaccgatttcgtcattgtgggctacttgtatcaggttgtccagtttcacacctttgtgtacgatggttgcccccattgtagcacggtctacacaagtgtttgcacctatctctacattgtcttccagtattacgataccgatttgaggtattttttcgtaaccttcgggagttggggcgaaaccaaaaccatccgcaccgatcacacaaccggaatgcaggatgcaatgattgcctatccggcagtcatgataaatggttgtattggcatataagatacaatcactgcctattttagcaccactaccgatagtcgcatgcggatgtatcattgtattgtctcctacttctgcgtattcaccaatgcaagcgaagggtgcaatgtaaacatcctttccgattttagcagtttctgcaacgaaagctaacggatcaataccaacacgtttaggcttactttgttcgtaaaggttgagcaatttagccaaactttcgtaggcattatccaccttaattaaagtagcttttatttcttgttcaggaacgaagtctttgtttaccagtacaatactggctttggtttcgtagatataagatgtatatttggggtttgacagaaacgatatagcaccggggatgccttcttctatcttggcaaaagtatgtacagttgcattctcgtctccaacgatttctccttggataaatgttgcaatttgtttagcagagaactccattgtcttattcttgttagatggtttcaaatcacaaataacggactttttttttatatttccttgtccttgggtgaatattttatacttacctatgcaaacgttggtagcaaagatagtatttttttaccttcttggacaatagggaaatattgagcatgtccgatgcttcagcaatattcttaatacttccgtctttataaaggatatcaatactatcgtctgccgggtcgtacatattcttctcgatgctgggggtagagacgaaatagctcgcttcagagaggggtatgtccagttgctgactgatttgcaaagttaactcttttttcctttcttcacatattggttcggtagaaatttccactttgaagatattgcggttgatcataccgaggctcagcgtggataaaaccttgtcactgtgggtgctccagacctttaatgcggtccatatatcattgtcgtccagttggataaagttctccaggcactccgaattgttatagaaagtttccttgttgatgtcattgtaaaggaaaaaacgcaatgccggtgaagcaaataattctacacctttacttgctaattctttagcacggagcagggcgctgatgagcattttctcgtatgctacggacgttttgtgcagatatacctgccagtacatcaagcggcgggcagtgaggaagttctcaatggagtagatacctttggattctaccacgagatggtcttctttcacatcgagcatcttgatgatgcgtgccgagccgatgttgccttctgttacgccggtgtaaaaactgtcgcggcgaaggtagtccatgcggtccatgtcaagttgtccgctgaccagttggtgcaggaacttcttggggtattcgtccttgaatatctggatggcaagtgtgagttgcccgttcatttctttgttgatacgctccatcagcatgagggagatatcctcgtgggatacgccctgtacgatggtgtcttccagtacatgagagaaaggaccgtgtccgatgtcatgcatcagaatggctgcctgtactgcttcggcttcactgtcgaaaatgaagtttcctttgctggcgagctgctggacagcttcgctcgtcaaatggaaagcccccaacgaatgttgaaagcgagtgtgttgcgcaccgggataaaccacagacgacaaacccagttgcttgatgcggtttaaacgctgcaaaaggggatgccgcacgatgtcgtacagcaaccccttcgggatattgatgaacccgaataccgggtcgttaatgatctttcgttcgaacacgttgttagtgattaagggtaagtgataagtgattaggcgttaatcactcccttcaactgttccgccatctgctgttgcacttcctttgcggcgttgcgtgcagcttctgcaaatttttcagtcttatccacatagatgatgccacggctggagtttacaatcagtccgcaagtggagttcatgccatacttacaaacttcttccagtgagccaccctgtgcacctacacccggcacaagcaggaagtggttgggaacaatcttgcggatatcttcgaaagcgcggccttgtgtggcacctaccacatacatcatctgtccgtcgttgccccattcctgagacttgcgcagtactttttcgaaaaggcgttcgccgttgggatcttccgtcaactggaagtcgtgggagcctttgttgcttgtcagtgccaggaggattacccacttgccttcataagtcaggaacggagtaacactgtcctcacccatgtaaggggctacggttacagagtcgatgtccagttcgtcgaagaatgtgcgggcatacatggcagaggtatttccaatgtcaccacgctttgcatcggcaatgatgaattggtcgggatagttttccttgatatatttcacagtcttttcaaaagcaatccagcctttcacgcccatactttcatagaaagcgaggttcggtttgtaggcaatgcaaaggtcagccgttgcgtcgatgatggctttattgaaggcgaagatcggatcttcttctttcaacaagtgttccgggattttcttgatgtctgtatccagacctacgcagaggaatgatttcttacgcttgatattttcaaaaagttgttgtttatccattactgaatctatttaatctgtttataattcgtttggttatttcttgaataagtagccttctatgcgtaacctgagagcatctttccttttcttattgtaatccagagagaaacttgttagcatgaaaaggcatctgtcggaattacatttaaatcgggtagggggcatttgattatatttgtgattatcaagtgcctccattgttttcaggtcaatgaagatcgtatcgttcttattattagtctgagtggtaaggggaacaggcagtattcctgtttccagatagtcgtatggtatgtggaagtatctgtcctttatattttcatccggtacgactatgaactgatggtacccgtccggtatctggatgctgacttgatgagaactcttgccgctgtatgatacaaaggaatcggaatcgtctgttatatcggtagtaccgtaatttttagaagaatagaatgaggcatccttgtccacaaggtcggctatacttttccgtccgaaccagttgcgcagatatctgaacttgtcgtttacttgcactgccgtttctgccgggagcgattccatccagtcatcgtattgttcacgggtgagtggcagttttaaattagtgcgtttcagctctttctctacgctgctgcgcatgatattccgggtgatacttgcataattgactggcagtgccgaagttagcagaaagaggatggagaacgaaatcggtatccaactgatgcgccgggctttagtgaagacgagtccgatacaaacaatatagcaccagatgttgagagttataaggtaaaggcgattgatggtgacgccgtaatcgttgaagcggcgtataatgccgattgtcatcagtaccagcatcggcaataccaaagcgggtaaccaacgcgcaatccattcgtttataggtttcttctcctgaatacgcacgggatacaacccgaattcaatggcgatacatcctgccatcagtgctaccacgagccaggatacccagcctgtgggcagttcccaactgataaaaatgcgggctgcatagacataaagcacgaggaggtatcctgccatgagcgggagaaagagaaaatgtatcgtgccgttcaggaactccgagggttgcggctcccggttatgtttttgttcatctttgggcagcatgccaaggaagagtaacatcggaagcaatacgctacatataataaggatatatagatagcaattccaacttacatccacgttgaagagttggcgaagcgagaaaaccagcaggctgattccaccgctcatgataagccccaccacattggccgtgacaaaagcgccaaccgtgtatgaagcgaagttccagcttggaatgtcattcttttctttgatgaatgaaaggaagaaagccgaaagccacagtgccagaatggcggctccgtgggctatgcctatttcggtaagcgactgttccggtgaaaggctgtagaggtacaccgcatcggcaatcagcagtacgtgcattactatatgtacgatcactccttttatcttgctctttatctcttcgctccacaggtggagagtgagtgagagcaacgtaccgatagaaaaatagtaacccagaaccatcaccagcttcctgtcatcatccatgtcggtagctaccagatagactaaatagacggtaagtgcaaggacaaaacatactgtagaaggaaagcgcctcaggcaattttgaaacgcttccgtcagggtgtgaaatactttatgtagtagctgtcctttcattcgctctgcttcttaacctattggtttacagttcgctttctttcagacgttctgcattttccgctacaatcaggtggtcgatacagtcctgaatgtcaccgtccataaaggcggagaggttatagatggtatagttgatacgatggtcggtgatgcgtccttgcggatagttgtaggtacggattttagcggagcggtctccggtagataccatcgtctttcgcttggaggcaatatcgtccagatatttctgatgttccttgtcgtaaataaaggtacgcagacgtgagagggcacgctctttattcttcggttggtcgcgtgtttcggtacactcaatcaggatttcttcggaagcaccggtgtttggatttctccatacatagcgcagacgtacaccggactcaactttatttacattctgtccaccggcaccgccacttcggaaagtatcccatttgatttcgccttcattaatcactacatcgaactcttcggcttcgggcagcacggctacagatgcggcggaagtatgcacacgcccctgagtttcagtagccggaacacgctgtacgcggtgtacacccgattcatatttcaatgttccgtacacattgtcgcccgtaacgctgcaaataacttccttaaatccacctgccgcgccttcgttgacgctggatatttccatcctccaaccttttgtttcgcaatatttggtgtacatgcggaaaaggtctccggcaaagatagcggcttcgtcaccgcctgtacctccacgaatttcgaggatggcgttcttgctgtcctgtgggtcggcaggcacgaggaggagtttgatatgctcttccaattccggctggcgtgcctgacaggcatccaattcttcgcgtgccatttcccgcatctccgggtctgcttcattggagatgatctctttggcttcctcgatgccgttcagcacctggatatattctttacgggcctccatcaggtcgcccagttctttatactctttggtgagttttacgtaacgcttttggtcggcaatcactgccgggtctgtaatcagcgtcgatacttcttcgaagcgggcaacaagcccttcgagtttctctaatatggtattgttgtctgccattgaattagtatttgaattctccgaactcactattgataatcagttctttctgcttgctttcttcaatacgtccaacaatctgtgcatcgataccgaaactcttgctgatggcaattacctcctcggcatgttcgggcgacagatatacttcaagacggtgtcccatattgaataccttgtacatctctgcccagtccgtattgctctgctctttaattgttttgaacaaaggaggaacagggaacagattatccttaatcacgcggcaattgtcacctataaagtgcaacactttcgtctgtgcaccacccgagcagtgtaccataccgtgaatttcagggcgaagtgcatccagcaacttcttcactaccggcgcatacgtgcgggtaggggagagtaccaatttgccagcatccagcgggctgtcttctacggcatccgtcagtttcagaccaccggagtaaaccagttcttcgggcactgccttgtcataactttcgggatatttctctgccagatatttggagaatacatcatgacgggcgctggtcagtccgttgctgcccataccaccgttatattccttttcgtaagtagcctgtccgtaagaagccaagcctacaattacatcgcccggacggatattggcattatcaatcacatcactgcgcttcatgcggcaagttacggtactgtctacgatgatggtacgcaccaagtcgcctacatcggcagtttcaccgccagtggcatatacgcctacacccatttcgcggagctcggcgagcaattcgtccgtaccgttgatgatggcggagattacttctcccggaatgaggagtttgttgcgtccgatggtagaagaaaccaggatattatctactgcacctacgcagagcaggtcgtcgatattcataatcagtgcatcctgtgcgatgcctttccaaacagaaagatcacctgtttctttccagtacatataagccaatgaggacttcgtgcctgcaccgtcggcgtgcataatgttgcaatactccgggtcaccgcccaaaatgtcagggataattttgcagaaagcctgcgggaaaatacctttgtcgatgttcttgatggcattgtgcacatcttctttagaagcgctgacaccgcgcatcatgtatctttggttactcatgagttgatatgttttttcaattgaatgtgcaaagatagtgcaaaatctcgattttatgagtaaaaagagaattcattctctttttcgaatgtgagagatttatttaaactgagtgccccggcatttgcattttgctgaggtgcagcctatcttcacgtagcaaaagtagcgattattttgcttatagccttgcctttgcataagaaattggagtttggggcgtcttcacttaatcctttcatgttgataacacttacctttcatctctttctcttatacaagtgatgcaaaaggtggcatctttcgtagcaaaagatgccaccttttgatgttaaagatgccaccttttacaacaaaagatgccatcttttgcatgatggctcagagagttgtgtgagggcggtagtaatgaagcagggctgaggctttattctttgcttcccaatcccatagtcttcagtcgttcccaaatggttttcttctgggataatgctactaaggcaacgcccatcaggcaacaggcacagcgcaattctttaggggaaagcgtatccagattatctgcgatagcaggcagagaatagttttcttcaaaaaaagaaaatacatcggctgagttttctaagtcgattttcatttggcaagagcaggtaaagtctacattcatcgtgttataaatttaaaagttgtagtttgtcctaagtttctttataatgaaaaaagggcgtgggtactattgttatattattcttcccaaaggctctggtaaacccaccaagaaaataataagcaatagccccacgccggaacgtatataacaaagttatatgcaatccagacgtggagtctttcacctactattcgttcttgtaaaaatttaccagattttttggaaaacgaataataaaatgatctccaaatcacaaagtatatttctccacttattgaagaaatatgcaacaaagatacaggaatttttaatatggatgtatataatgaggacgaaaatgtattaattacgggatggtaatgaatcaaatgatcaagtgatactatcttaattctcctcctcttgggaggaggagtacccgaagggggaggtggtaggtgagaaaataattccttatttatatgattcataggtatttcttgctttacctaccaccccgccctttgggcagaggttgtgtcaaaatgctggcacaccctctttttatgcgcaaagcccagactttctcaagcccgggctttgttattacccaaaatttttgtaactttaggcataaagtttttcgttatggcaaagttacattttcgtccttacattcccaaccaaaccgttctttttccacaaagaattgatgaaaacatagctgcggacgatcctgtccgcatagtcaatgcagttgttgataatcttaatcttgataatttcaagaagctttataaagaagcggggcgctcagcttatcatcctaaaatgatgcttaaggtaattatctacgcttacatgaataatatctattcctgccgtaaaatagagaagcttcttttgcgtgatatccattatatctggcttgccggtcatgagcatccggatttcataaccatcaaccgtttccgtaaccgtgtaaaggaggagataaacaacgtcttcacgcagttggttcttgtcctagctgacaagggtttcatcagtcttgacgtagagtatatcgacggcaccaagattgagtccaaggccaacaaatatacttttgtctggcgcaaaacagtcgaaaagaaccgtacaaggttgctgaataagattcgcatccttctggagcaggtggatgaagccattgtgcaggagaactctgtaaaagacacatccgtggagttgactcccgccatgctctctaatatagtggatgaactcaaagaagtgctggaacaacagcctgcaacacaggacaaggaacaaaagaaagctctgcgtgaaaaaaagaaacaggtcagagaacttgaagggtatcgtgacaagctgatggaatacgacaatcaccttgaagtccttggagaacgtaattcctattccaagaccgatcctgatgccacattcatgcgtatgaaagaagacgccatgaagaacgggcagaccaagcccgggtataatttacaaacaggcactgaaaaccagttcatcatagacttccggctgtttcccaaccccaccgatacgctgaccctgatccctttcttccactccttccagcaccgctataaccgcttaccgggtatcggtgtggcagactccggttacggctcggaagaaaattaccggttcatgcaggaaaacgggatagaggcctttgtcaagtacaactacttccataaagagcagcgtccccgttatactcccaacccgttccatgcggaaagtctccattacaatgcgggggaggattattacgtttgtacgatggggcaacacatgaaccgcataggaaccagacgtgacaaaacagcgagcggatacatcaccgaaagtgcccggtacaaagcacaaagatgcgaaggctgtcctttgcgtggaagttgttttaaagcacaggggaaccgtattatagaagtcaaccaccggttaaaccaatataaacggcaggcacgggaaaggttactctcagaagaaggaatcaggcatagaggcaggcggtgtatagaaccggaagctgttttcggacaaatgaaatacaacatggcatacaggaggttccggcatgtgggagaagacaaggtgacaatggactttgccttctttgccatagcttttaatatcaaaaagatgtgtgcaagactgagaaaagcaggaaaggagttcattacacttgctaaatctatatttattgggctatttataactcgatacaacgggaatatagcaacttgttaccaaatgaatgagaaaaaagcggcgtagacaaaaggaaatatagcaggactgtaaatcatcaaaaaaggttgtgccaacgttttgacacaacctcaattgcgatactctgtttacataataattgagatactctatctatttaatattggaattatcatttggctcataccttaccctgtaatatatctcctcaattttcttttttttctttcctctgcaactaattcccaaaccgggcgtcttatgtataaaagactatcttaagatggaacaaaatgataaggaaaaacagttcacttccctcatcgaggaatacaagcgagtgatctataaaatctgctacatgtatgctacggacggggataattttaaagatctctaccaggatgtagtaataaacctttggaaaggcttcgagggttatgaaggaaagggtaaaccttcttcgtggatttaccgcgtgggattgaatacctgtatctccttctatcgccagcagcaacgccggggcgaacatacttccttggattccctctacggcttggaagcagaagatagtgaaacgaccaaacgcttgaaagagatgtatcgtctcattgcgggactggataagtttgaacgtgccgtcatcttgctgtggctggatgagaattcttacgaagagattgcggaaattgtcggcgtgccgcgcaataccgtagcttcaaaattgaaacgaattaaggataaacttacaaaacaggcgaatagctaaaataaaacagattatggaactggaagaattaaaacaaaattggaatatcatggaagaaaggctcggacgcctggaaatggaccagcgccagcaactaaataataaggtagtcagtaaagtaaagaaggtccaggatcgtgtgttgcgtcgatttacgattgtagtgatctgtttacctttcttttgctggtatattgttcataatcagatgtgtgattttagcatgtcaacgtgggtgctgttgtttctgtttgtagctgtgataatagcccggcaattcacatggatgttgctgttaaggaagattgattgcctgaagatgactgtgcgtgaagtgtgtctggcggagagccgttttcggatgtctttcaaagtggggatagctgtgagtgtgttgtgtgccgtacctttactggcaagtatgatatgggatatgtcccaaatgggggatcgttatatattgataggtgcctggactggtcttgttgtaggaacgctgataggaattcgtttgttccttaaagcatggagcgggataaaagaattgaaagaggcaataacggatttgcagtagtcatcttaaaaaatgaaagtacccctttcactctggaaactcgaatagatcggagtttccgatgagtggaaggggtacttgttttttatagaaccgtttgttacggtagggatatacttatttagaactgtacctgcggtgctgtttcagctccttcggaagcttcaaagtaagcacgtttttcgaaaccgaacagacttgcaagaatgtttctcgggaagcggcgaatagcagtattgaaatcctttgctgcattgttgaagttggtacgtgccacgttgatacggttttcagtaccttccaattgagcttgcagttccaggaaattctggtttgctttcaagtcggggtaattctcagtaatggcaagcaacttacccaatgcagaagttaccgcaccttgagctttctggtattcagccaacttttccggagtcagatcattagcatctactttaatttgagtagcctggctgcgagcctctaccacaccttccagagtttctttttcatgagaagcgtatccttttaccgtactaaccagattcggaatcaagtcggcacggcgttgatattgtgtttcaacgtttgaccattgtccgcttacgttttcatccatagttaccagtccgttataaccagtgacaccccaaatgacgaggagagctaaaacaacaagaatgataatagttgatttcttcatacttttcttttattaaatgattatacaatttatatatttctgctgtgcatcagaatcgagaaccggcacctccgccacctcccatacctccaccgaagctgcctccgctgaagccaccgcctcctccgccgaagcctccgccaccgccaaagatgaccggacctcctccgccacctccgcgatagttttcatcatacgactgtttgcggcgtactaccttgtgtccgcagttgcggcaagtgtaggtaacatcttccgtttttactccgttgatccgtgaaaccactttgctgctggtacgttgtaatttatgctgtccgcagttgggacatttacttgcggcacgtgccgccatccagccgattcctccggcaacaacaaagaatccgataactgctgccagaatgccgaagaaggaaatgtcttcttcatcatctgtatcattcaccatgctgccgtccagtctgccgcatacggcacgcacaccggcaaccatacctgcatcccagttaccatctttcagataaggaatcatgtcgcgcgtctggatacgtttacagatggcatcgggcaggtctccttccagtccataaccagtatagaactggatgcagcgctggtcggtcaccagaagaatgaccagaccattattctttcctttctttcccacaccccattcattgagcaggcggtgtgcaaagtcaaagcaatcatcattgccgatggacggaactacggcaactactgtctcaatgccggtctgttgttccaatgcatacagcatacggtcgatgctgtcgcaggcagtctgagagaggatgccgtccggattgcagacatagcgcattttgttctgaagatgtactttggggatattgtctgtagtatagaccttctgtgcctgcatggatagcagcaggcataggaataaacttatggagattaatcttttcatactaatgtatttgtgtggcgaatataggaaaaatcacatcaatagatgtattttcctacaaaattcttcacacgttcggtgtattcctccgggtgatccttgtaggacatggcgtgtgtggcaccgggggcaagccacaattctttgggttccgattttgcctcgtagaggggatataccatccaggtgggtacgtatgtatctgcatcgccatgaatgaagaacatcggcagtttgcatttcctgacctgattcagcgaagaagcttccttgaagttccaaccgtatttcgcgttacacagccaactggtggtgtacatcaacgggaaaggaggcaacccgaactgtcccttcaactcgtaggagaattcgtcccatacgctggtataaccgcaatcttccacaaaacatttcacaaaaggttgttgaggctcaccggataccatcatagtggtggcggcacccatagagatgccatgtactaccatctgggtatttccgccgtaaatatcgttggcaatgtccatccagcgcaaaacgtccagccggtctttccaacccatttgaatggcagggcctccgcttaatccctgattctgcaggtcgggcagcagaatgttatactttaaatctttgttgtaaaggtaacctatcattagcatacggatgcaatcgtccgtatagccatgcacgatgacggctgttttgtgggtaggttcgggagcggctgcgtaaatggcatgcagttgcaccccttcagggttgataataaaggtatcccgtaaagcaccgacagtttgcaaactatctatccaaggcttgatttgcgggtactcgctgagcatatactcgtaggagccgggaatatctttccctttgttgtgctccggtctcagcgagtagccgagcatgtagaaactcgcacctgtgagggcaataatgataactgctaacagtccgagcagactgtacttgatacctttcttcatctttccttcctttcactctatttgttccatatttcccatgcggcaaatgcttgcaataacagcatttccagtccgtttttagtaacggcgccatgagcctctccctttttcatgaaaagggtttcattgggattatataacaaatcgtagagtaaatggttgggagttaattgatcataaggaatatccggacagaaatccaccttaggatacatgcctacgggtgtacagtttacgataatagtatattcctgcatgatctccggtgtcagttcgtcataagtgaggtaagacgattcctttttcgtacgcgatacgaatacgctttcgatgcccagattagccagtccgcgatagatggctttggatgcaccgcctgtgcccagaatcagcgccttcttgtggtggggttgcagtaaaggctcaatggactgtgtaaatcctatgatatccgagttgtagccgacaagctttacttttcccttcggctggcggatgattttgatgacgttcactgcgccgatctttgcggtatctttgtccagttcgtcaagaaaggggatgacctgctccttgtacgggatggtcacattaagtccgcagaggttgggattttcctctatgacttccataaagtcattgatgttgggtatctcaaagtttacatattcggcgtcgatattctccgatttgaacttttcattgaaatatccgatggaaaacgaatgtctcagcggatagcctattaaaccgtatttctgcataattctcttagtgtgctaacgttaataatactatatataaggtggtagagcggtaatgtgataggtgatatcacttatcactctatcactttgtcactttatcactctatttagtcgcagtataaagagtgcatataccgaatgtcagtctgcggaaattaacctgactgaaacctgctttgcgaataacttcctgcatcacttcgccttgcgggaaagcacggatgctttggggcaggtaggtgtaagcactattgtcttttgacaggcatttgccgagcaggggaatgactactttggagtagatggtgaaaagttgtttcatcggaaaacggtccggtgtggagagttccaggatgacgagatgtcctccggttttcagcactcggcacatttccgccaaccctttgtccaacccttcgaagttgcggatgccgaacgctacggttacagcatcgaacgtgtcatcggcaaatgagagagaggtgcagtcctcccgggcaaaggatattttgtccgaaaggtgcgcctgttttactttattacgtcccacgtccatcattccctctgagatgtcggtgcctatcagttcgtcaggctgcaactcgcggcaggcaagaatggcaaagtcacctgtaccggtggctacgtccatgatgcgctttggttggaaaggctttaaccaatggatcgctttccggcgccaactgcggtcgatgcctaatgaaagggtatggttcagcttatcataagcaggagcaatgttgtcgaacatttcttctacctgttcactcttctttccgtcctcaccgtaaggtttgatatgttcctggggataatccatgttgatagtgtttagtggttagtgataagtgattaataaatctactaatcacttatcactaaaccgtttatcacttatttaagtattccgttacgttcttctcgatacgtgaagcaatgttgctggtatcttctttcacgaattgctctccggtgatatgctcgtatagttcaatgtaacgctcactgatagaagctacgatttcgtctgtcatttccggaacttgttgtccttccttgccctggaaaccattgtccatcaaccattcgcgaacgaattctttagaaagttgtttctgtgcttcgcctttttcaaagcgttcctgataaccttcagaatagaagtagcggctggagtccggtgtatggatttcatccatcaggtaaatagtaccgttgtgcttaccgaattcatacttcgtatctaccagaatcagaccacgttctgccgcgatctcggttcctctgttgaagagtgccatggtgtatttctccaatacggcatattcttcgggagtagccagacctttagcaaggatttcttcttttgaaatgtctgcgtcgtgttcaccgatttcagctttcgtagtcggggtgatgatgggttcggggaacttctggttttccttcattccttcgggcaacttcacaccacagatttcgcgtacaccgcttttgtaagtacgccatgcgctaccgcaaagataaccgcgtacaatcatttcgatggggaaaccttcgcacatcacacctaccgttaccatcgggtcgggtgtagctgtcttccagttagggcaaatgtcagtagtagcatccaggaatttggctgcaatctgattcagcatttgtcctttgaaaggaatgcctttcggcaaaacaacgtcgaatgcagagatacggtcggttgctaccataaccagcttttcaccattgatgttataaacatcgcgtacttttccgtggtacacacttttctgtcccggaaaattgaaatcagtttttgttaatgctttcatcattgttatatttatgatttggatattttctatggttttcaccacagagtgacaccgagtctcacagagttcttttctgctctgtgagactcggtgttaccctgtggtgagttttcttttttcccgttcggctttggtttccttatcaaatttctcgtaggcatctacaatgcgggttaccaattggtgacgcacaatatctttcttgttcagttccacaaagctgatgcctttcacacctttcaggatgcggagtgcctgtaccagtcccgaagtctgggaagagggcaggtcgatctgtgtcatatctcccgttacgatcatcttggtgttcatacccatacgggtgaggaacatcttgatctgctgggtagtggtgttctgcgcttcatccagaattacgacagcatcattcaacgtccgtccgcgcataaaggcgaggggagcaatctgaatgacgttcagttccatgtattctttcagcttggcagccggaatcatatcctgtaaggcgtcatacaacggttgcagatacgggtctatcttatccttcatgtcaccgggcaggaatccaagcttctcaccggcttccacggcaggacgactgaggatgattttcttgatctctttatttttgagggcacgtacggcaagggcaatggcagtatacgtctttcccgaaccggcaggacctatggcaaataccatgtcgttcttggcgaaaccttctaccagtttaagctgattttcactgcgggggatgatcggtttgcctgtcacgctgaatacgatgacgttacctgatttttctgcttgcggtgcatttcctttgatgatatcgatgatcacctcttctttcaatgagttgtattcggcgcagtatttttccagtttggtaatgttttcttcgaatgcgcacatctcttcttcatctcccaacactttgatgacattgccgcgtgcaacaatgcgcagtttggggtacaaagcttttatcaactgcatattggcgttattcacaccgtaaaagataaccggatcgatatcctcaagaacaatcagtttttctatcattgaattgtttataagttcatgtcgttttataggtaaaacagttgcaaatttagtgaaacgtttggatacttagctggttccggctgttttttttgttgcaggcttcacgatgacgccttttccattcttggtgcagtgaatacactctttgcggagtgtcctttctttgaaatcgaaaatgagattggggttgaaatgctgcccgttgatgcgggtttcaaaatgaaggtgttcggtgctggcccgtccggtacgtccggtcagtgcaatgggttgtccggctttaacggcgtcaccgctctgaacaagattcttaaaattatggctgtatatcgtttccaatcccgaagaatggcgcacaacgattacgttgccgtaagcactgtaaggcttcgacatacgtacaatgccatcgaaagcactgcgtatcgtgtctttggcgcaagtcttgatatcaatgcccgagtgacggccgccaccacgtccgtaaggagaaatcacttttcctccgggaagcggaaagcaataagcggtgtcaggtatttgctccagatgcaattctaacaacttttcgttatcgaaaagccccggtgtagtaacccggatatgattgatttccatttgcgagaagctaggtttctcttcaggcggagtataagccagtgcgaatgacagcagcagaaagaatatgttcatgattaaaggtccttctcgttattcaaaatagataatttctcctccattcgaagaagtatattttttcagtaattcctgtatcatctcggcagcttcccgcagaccttcctgtccgctgtaaccattgacgatggcaaggatatgctgggtgcctaaatccattttagtacgttcgttgtcgctggtaggagtaccgataccgcctacggcatcgcgatagaccggaagtccttcgatgttcagcacaccccgtccgataccttcgaatggttcttcggcgcgtccaactcccagtttgaggtcagtgccctgtatcttgtccgcatcgaaaccaccgatggaataaccggtgcgcagggataccagattaatcaggtcaaccaatgtatctatttggtaaagggcaattccgcgcatcagacggcggcgcaaggcttcggcagaaggacggtaacggcttgggtctttgccgcagcgtttataagcttcgcgggtagctgcaatggcgggttgcagtttgatgtcctccggctgggtagtggaagtcagttcccgggtgaaagtgttgatttcttcccaaagtccttcgcaaaaggctgtattggtaacttctgcatagacggctgcacctttgaagatggggcaggcattctttatttcttctgatacggtgatctggtacataaactaaaactactatttaaacttttcatgtaaaacaaaaataagataatcactccgcaactgatggcagcatccgctaaattgaataccggactgaagaatacaaaattgtctcctcctataaatggcatccagcttggccagttaaactcaaaaagaggaaagtagaacatgtcgaccacttttccatgcagccaaccggtatatccttcccctataggtacgaaagtagaaatctcggtgggtgtactcttactgaaaataacgccatagaatatgctgtcgatgatattcccgatagctcctgccagtatcaatgaaatacatgcaatatagccacgcttatatttagctttaataagtatgacgatataccatccaattgcgatagcaaatattgtgcgggcaatagtctgaatggctttaggcactatctgcataccgaaagccataccgggattttctataaaacgaagataaaaccaatctgtgatatgaatgctttcattataaaacatattcgttttaacctcaatctttatgacttggtcaagaatcaaaattcccagtacaatgagaattgatagttgccctttggacaaaatgttcttcatattaaaaagttatggttttgtgtctactatcataattcccgatagtatacgtcctgatttaatccccagccgtcttgccgagaaaaattcttcatgtctcatataagtgcaaataccagatgtttctatttgctcgccgggtacgccaaaatcgagcaactgcatccggttcgcagcccataggtctatatgatgcttatgtgtttccggtttccattctgatatatagtccattgcaaaaccgttcatgcggaaagcttcgtacacttcttcgcctacttcaaaagaaggcaaggatatgccggggccgatacaagcgattacgtcttttccatcggttccgtagagcgcccgcatcctgtcgagagtgtgtccggctatgtaattcaccgttcctcgccaacctgcatgggcggcggctaccacttggtttttgcgatcatacaacaggataggaatacagtctgccgtagaaatgcaaatgcagcaacccggttcctttgtgattagtgcatccaccccttgcagcatgaccgttcgctcgtcagatgtggcattgagatacttttcatcaatcacctccacctttgtaccatgtgtctggaacggaatgactaattctttagggtgttgaggcatggagttgcagagtagttcttgattgcgacggacagattccgcatcatcccccgtgtaaggcgtacagttgaaagaagcataatctcccttgctgaaacctccccggcgggtagttgcgaaacaaaaaatgttggagtacggtgtcataaccccgtatcccaacattcgtttatcttctgtcagagcaatcattgcttgtcatcctcccagtcctcttcctcatactcaaagtcttccaagtcttccacgtcctcgtcatcttccacatattcatagctgaggtcttcatcctcacccatgtctttcagttcttgctggagtttgcttacatccttcggacggtgaacgatagcttctattttgttactatccttattcaactcttcccaaagaatatctttcagcacggaaagtcccataccggtaatggaagaaatgaatacatgcggaacgtttgcagggagtgtaggttctatttcgtccatcaattcctgatcgagcatatcgctcttggtgatggcaagtacccgttgtttgtccagcatttcaggattgaaagtgctcagctcattcaacaggatttcatattctttccggatatcatcgctgtcggcaggcaccatgaagagcaacagagaattacgctcgatatggcgcagaaagcgcaatcccaaaccttttcctgcactggctccttcaatgataccgggaatgtccgccatgacaaacgacttgctatcacggtaagaaacaatacccaggttgggttccaatgtggtgaatggatagttggctatcttgggcttggcggcagatacggaagcaagcaaggttgattttccggcattcgggaagcctaccagacctacgtctgccaagagcttcagctccatgattactgtcatttcctgcatcggttcacccggttgtgcaaagcggggtgcctgacgggtggctgtcttgaagtgccagttacccagtccgccgcgtccgcctttcagcaaaactacttcttgtccatgctcggtgacgtcacagatatattcgcctgtttcggcattgtataccactgtgccacagggaacttcaataatcttatcttctccatccttaccaaaactgcggttcttggaaccggattctccatgtcctgccagtgcatggcggtcgtagcgcaaatgcaacagcgtccagtagttacggttaccgcgcaggataatgtgacctcctcgtcctccgtcacctccgtcggggccgccattgggtatgtatttctcacgcctcatgtgcgtagagcctcgtccgccctttccggagcggcaatatatctttacgtagtcaacaaagttcgattcagccatttctttccttacgattgattttaaaatacttattttctttttcgatgcaaaagtaacgattctccaagactacctcaaacttttttattcctttttatttattaatccgtagcggagggcgtttctaacttatttttagcactactcgtctataaacggtaagtgccggagttgcttcatctgtcaattctaaaatgatatgtatgttttggcccgcagcatcagcaggaatatgcactttgcatttttccgcattatccccttctatttttacttcacctttgtaactgcttggttcagtataaacactccacttgtatatcagcttgttaccatcaggatcagttgaaccgctggcatctaaaaccatggaatttccggcttttaccttcttaaagatacattttagcgaacggtctccatcaagcactgcatgcggatggtgattcaccgctttataatcatcggttgtagtccacaacatacgtgctgcaaaattattccagatgtgctgctgccatttgttgatggcggcacagccctctttgcagcttccatgcatataataagggtcatattgtgtttcatctttcccgctgcgcactataaaatccatacctcgtataccactcgtcttttgattggagaaacgaccgccccatcctccatattcaagtgaatcgggtacgttcaggccattggcatatacataaaagaaagcaggagagtcaccttccgttgcccacttccggtcaggataatgcttgcctaatggctgatgactttgaatattctgtttaagccattgatcggaaggtccccaaccatatacttctttatttctgatatatactatttccgggaagttcttggctatccaggctccggcatcatcttgccctagaacatcatatatgcggatttttgcagtaaacttcttaaggtctttctcgctgcgtgtatgcttcactttccataaagcttgcgctatcgtattcattccaccccaagctgcaagccatacggggcgttgatcctttttcttatcgactaccgagattatcagttctgatcccggagaatctttatcttgacctactccggtcatgttagaggaaggttgccctcgtttaataattgcccgcagttgattcaaactgggatacccttctgcatgtttattcaagcgaggcagaacttctccaaattgttctactacctctgaaattttagctgttttatctgggtcatccatccagacttgtgaactgattaacccctcaatgtcgattacatttgagcataataacaagtgtatcattgactggatatcatccggatcagttccccctaaatcagtggttacaatcagccgatgtttgtcctcattagccacttgcgcctctgaataaaggctccatgctgtaagaaagaaaaagaagaaaagtacttttttcatggcatttaaagattatttttgcaaatttaccaccaaaatgtgaataacactctctatttttatatacgaatataatgaattccgagaaatgttacagttttgataagttccgtgaggagtttgaaccttatggacttacatgtgagacatggataccccgtgttatgccaagatacgataggcataatgaaatagagataaattacttgccccaagggaatatcacttacttgcgacacaacgaaaaaataacgatacccaataagcggtttacgatattctggggacttattcctcaccaaataattcattatgagaatgtagaaaagtattatgtatgtaccattccttttgctcattttttatcctggaagcttccggcacagtttgtagacagcttgctcagaggagatattctatatgaacaaacagatgaatattctcaatatgatgagttcttactaaataattggttgaaagatagcggcgttaatatgcaatcggatcttattttattagaaatgcagaccagaatcactcgcatggctcatcacttacagtcttcagatgatggtatagcattggcttcataccaaacgacacttatcgaaaaaatagccatatatcttactaagaattattgtaatgatattaaagccaatgatatcggtgatgcagtaggtctgcaccctgattatgccaatcatatatttaagaaggcatttggtactacaataagtgactatattgctgagttaagaatagctcatgcacaacgtaaattactgactacagacatgagcattaccaacattgcatacgaatgtggattcaattctatagctcggtttaatgctacattctttaagaaaatccaatgtaccccgcgtgaatataaaaagaagatcgtgaaatagttatttgttattttagggcagacgggagaataacaaagcgcggtaatatcattttcatgggtattaccgcgcttctaaattatgattgtgttactttactttgcagcgtcgattgcagcgcaaacatcagcaaagatttcttccaatgcaccttgtcctttgatgtgctggtattgtccttcctgcttgtaccagtcaatcagcggagaagtctgtgaatgataaacatggagacgtttcttgatagtctcttcgttgtcatcggcacgaccggagtccttaccacgtttgatgaggcggaccatcagttcgtcttcaggtacatccaggtcaagcatcacgctaactccctgatttctttcagcaagcattttcttcagagcttctgcctgtgcaatcgtacgggggaaaccgtcgaagattacacctttgctgtcttcaaagctgtcgaatacacttgcaaggatatcaatcatcaggtcgtcagggatcaactggccttgatcgatataacttttagctgttttgcccagttctgtgccgttcttgatttcagcacgcaacacgtcaccggttgagatgtggttaataccgtacttttctacgattttctcactttgtgttccctttcctgaaccgggagcaccgaaaattacaatgttcaacatttgtgatttacaatttaactgttacttatattatacctaattcaaattcttttttaatccaccactgtataaatgtccgcataattgcgcccgaagccatcataatccaatccataacctacaatgaagtcattaggaatttccatggctacgtattctatattcaaatctactttcaacttatcaggtttcaccagtaacgaagcgatgtggatttctttcgggttacgtgtgcccagcgtgtccagcagacgttgcatagtcaggccagtatctacaatatcttccacaatcactaccgtacggtctgtcagatcttcggtaataccgatcacttctttgataaccccggtagaggacaccccctgataagaagccagcttcacgaaagaaatctcgcagggaatagtaatgtttttcatcagatcagcagtaaacataaacgagccgttcaggacgctgagaaacagaggatttttaccagccagatcgcgattgatttcatttgcaacgcgggttacttctttcagaatgtcctgttccttgatagaaacagtgaactttttgtcttttatttgtatggtgtccataagggatagatttttaaaattggcacaaaaatacgatttttattctactccatgcatcatcttctgtaatttctttgagagcaggaagaggataagagaggctacgccggacatgataacgaataccataaagaagtcgaacatggtttcaatacggaatccgagcagggttttcactttcccgtcttcgggataaaggccgcctaaagtacctgcaaatttattggctgtagaggtggaaagataccagattcccatcataagagaggcaaaacggacaggggtgagtttgtttaccatggataagccgataggagagaggcataattcacctatagtgtgtataaaataaagtccggttagccaaatgaggctgacttttacgccaggttgggtttcttttacaccgaaacaaatgactaaatatcctaaagagagtaacaataaaccaatggcttgcttggtaggagaggctggctctatgcctcgtttatagagtaaattccagactcctggcatgatagcagccaagattactacaaagaatggattgagagactgtatccatgaagctggaacttcccaacctaagacaaaacgatcggtctgttcagctgcgaagagggttagtgaagcacctgcttgttcataggctgcccagaagaagatgacaaagaaggcgatgatatagatgacgaaaattcggctacgttctatttttgtcagggaaccttccaataaaatgctgacaggaaatacaatgcaggcggtaaagataccaatactgatccaatcgtcaccgaagcaccagtaaaagaaaatagcgagtatgatggccagtagacctaaaagtaaatagttacgtttctttttattattattcactgctgtttgttgaatcgttttttccactttcggttgatctttcttagcatcaggaatgattcccagttgttggccgtcgggaccaataaggtatttatttttttgcgtttcgaatataactatggtaaatagagtaaaaattgctgcaatcaggaatccccatttgaaatcattaggatcacccgtctcaccgaagtaaccgcaaaccagtggggcaaagaaagaacccacatttacacccatatagaatatcgtataagcagagtccaagcgtctgtctcccggttcataaagttgtccgaccaatgacgaaactgtaggcttaaagcatccgtttcctaaaatcaagaaggtgagtcccccatacatcaaccagtgggaaagctctttagtatccagcatcgacgcgctgaagaacatcaggaactggcctaccgccatcatcatggcaccccagaaaacggaacgccggatgccccagtatttatcagcaatatatccgccgatgagcggagtaagataaaccagtccagtatagctgccataaatagaggcggcatgttccttatcgaacaagagagcctgggttagaaacaggataaagatagcacgcataccgtagtagctgaaacgttctgccgtgctggtagcaaagacgaggtaaagacctttcgggtgtttggatgtactcattatagtatagatattttctttatgggaggcaaagttatagaatctgattaaaaaagacattactacattaaaataaattgtctctctttggcgctataagtgaaaaaagatatatttttgcgtacgaagaggatgagaaaaagatttagcaggaaagaggtgcagtcgcctcgtaagctcaggagctttcttagaaatgtaaatactctggtataaataccacgatttacattagtaaatactcatcctcttccttttttagttatgtaagatgaatggaattctaatagcggtactgattgtcaccggcttgttgatttacaagattatctcttcgagccggaaacaggaaggatacaaaaggtggaaagccggaaaccgcagtaatacggaagatactaccgatacagaaactacccgtaaaggatggtttagccggtactttggtacttctgctccgatcaccattccatggttcgacgaggaggcagtggtgaagtgtgccaatctgttgggagtggaagaggcggccctgaaagagatactgaaagatattcccggacattaccgggaattctggattggtaaaagaaagggaggctaccgtatgatttcagcaccggacaaagaactgaaagccattcaggatactatcaatcatcgcgttttatcatttgtgaatctacatcccgccgctaccggtttccggtgcaagatgtccatttccgataatgtccggccgcatctgggcaagccctatgtgctgaaaactgatatccatgatttctttggttctatacgcagtctgcgggtacggaaaatgttcgagagtatgggatatccgccgaagattgcaagagtgcttgcggctttatgctgtgtacgcagatgtctgcctcagggagcatctaccagtccggcactgagtaatatcatctcttatgagatggataaaaaactggcggcactggctactgaatataatctggtttatacccgctacgcggatgatctcaccttttcgggagatgtctttccggcgcaacagatattgcctctgattaaacagatcattcgggaggaaaagtttgaaatcaatcataagaaaacccgtttcttgagtgggcataagagaaagattatcacaggtgtttccatcagctccggtgtgaagctgaccattcccaaagcaaagaaaagggagatacgcaagaatgtccatttcattctgacgaaagggcttgcggagcatcaacgccggataggttctcatgatcctgcttacctgaagcgtctgatcggaactctttgctactggagatccatagaaccggataatgtttatgtttccgattctattgctgctttgaaaggtttggagaaaggatcttagtttttcttcttctgaggagtaggttcaatatcgtaatatccttcttctgtttttatgattttgaattttccttctttcacccatttattccagtcgacaaacaaccaggtgatatattggtacatgtcttctgcaatattgatttccgctcctgatttcaggttcaataccagttggttattcttgacggaaaggtgtttcttggctctgtctacggctattacgtaaacagttcggttgtaggcgcggtcttcaagaaaacctgtatgatagttgtaaggaccgattgcatcatcggacatcggacgtttagtcttaaggaaggtagagtcggtaatggattcgcgtaccttgcgggcttcttcccaggctttcttgtgttctgaagaaatttcttcgtttctaatgtcctcttgaacttgtctgtacagtgttttaaactcagcttctttgcctgaaatagcaaaatagccatttggaatccgagcattaacccgaggattgcatactaccttattgttacatacaaagccgatatgtttacctatagaccgttcggttgcatctgcccatacttcaatcgactgttcgtttactcttcctacaatttggtatatcatttcgcctgtccgttcattcaaggaagagtcaaggcttatggaggcaaaatctttggtcgttacgattggctctgccgaaaggctgtcttgtttaccactcgtgatgtaataccatccattggggcgattcgtatcaatggctttttcacgaaggttcatagaaccgttgccgtttcctcccaatgagcttaaagccataagtgctactaataaactgaatgctttcataacttcattatttaggttactattcgatctctatttttagtccgacacccacttcgtgtacgggtattgacttatgtattaaatctatattcatcgcctgcgcattcctgatgaatgcgtcagagtatccggtatcaaacagaaggcgttcattttcatcttctatataataactcagggcaggttcacctatataatattcatcgatgtaggtgttgttatctattaatacggttagcttcatattatattatctatattgatagtacaaaaacaatctgtctcacttgtcaaaaagcccttttatttccttatcaaaatcagaaagaaaatcccggtcttgtattaatctgaatttttcatattcgtccagtgctttttcctgggcaatttcatgtgaaatctttcctgcatcttttaatatctcataatcactgatttgcaaggatacgcccatgaggagcatgtttccaggtcattaatcccatattcggcttttctgcgtcagcgcgttcgtaaatgatttctgcagctgtcttatgggttatggcccagtgcattgtgttttgtacgattctgtagaagttttttgtatccgtagacttaggatcataatcagcgctacattcggcgtaaatgtccgttatcttttgataataacgacgctctgaagtacgtatttcccgaatgcgtatcagtaattcatcaaaataatctttcccgaaaacatttgtattcttcagtcgttcgtcatctaatacaaatcctttgagcaggaattctttgagtacagatgcgcaccacattctgaactgagtggcttcgtaactgttaactcgatatcctacagcaattacagcatctaaattgtatacggcgacaggtctggtgaccgatctgttaccttcttgttgaactatctcaatttttcggatagttgcttcttctatcaattctttagtggaatatatctgctgcaaatgataattgatggtacgggtatctactccgaaaagttccgccatacgtctctgtgaaagccagaaagtctcattattgaaaatcacagatacggagatttttcctttgtttgattgatataagaatatgcttgattctaaggaacttactatgtcttctgctgtagtgttctctgaaaagtatgtttgtgccaatctcacaaaaggctttttcttgtctgcgttttgagagattatcagacaagcaagagaagataaccgacaggtgttaacttggcggtatgcaccggaacctaactgtaccatttcggtgaaggtgatgaaatgctcaccggaatggtttcctttttgctcgcatatagtgatagacttattaataactctttcgaaattccggtagtcattgtatcccataacattggctaattggcgagagttccaaaacgctattcctttctcatcgctctgcttgatttcatcaaacggagattgcattttcggaatttgcgatatgttgtctgggttattttccatcttattgatattttgtactatgattcacaaagatagtgtttctttctttttgcaattcgtactaacttgttttttattaattgtttcctgaaaggcgactcatacagatcgggaatattcagacagttttctcctgtagtccatacctcgtcactgtatcctgtcatttctgcatttatgaatgtttctgctattccacaatcatcttttgcataaaggaacattatccatcgatgaattaaagtctcatttaggtgttaactataaatggctggaacgaaacttttccgaagcagtcggcatgacgcccaagtgttactcttctttgcagcggttcatccatgcttatactgcttttcgggtacagaaagatttggttcgcattaccgcggatagtggttatagcgacacgaatcatttcattaaggactttaagaagtataccggacaaactcccatgcagtatttgcgtgcatacaatatgaaatcctgcctcacagaatcgtgaagcaggatttctcttgaaaagtctagtttagattgttccgttattttgtagagagtggcagcgattcatactccctgtattctctgtaatcttgtccgggaacagttatcggatcgtcataagtttcgtatatgtgcaatttgtcggtagttagctgtttaatttcccaatataatccgctatccatatagataatcttaaaattaggtatcgtgaatgaccaacggaaataacccatattctcggagacttctccatcatcatagttccacacgaatttacgggagccagtggcgtcacttttgaaaacccacaattcgtatacatcgcactctctgccgtcatacgacgtcatgtggtaggatcgttcccatccctcgttcttggtcaagttgtcgataatctcttgttgcccgtcatcgtagtagcccgatttctcgacgcagcccgtcagcagggagagaatgataaacgacaaatagatatatgacctttttatcatggatgtgaaatattaagtcttgcgatggtggtgttgctgtcgcaactgcttgctactccgaagttccattctgtatccggctgggccgcatgccatgcaaagcggggagcaatcatccgatatcctacaccgcaaaacagcacgttcaccatttgtctgttgccgttttctttcatttcacaagaaacgagaaatgcccaacctgcattcttgtaggcttgtggaaagagttcaatggatgtttcaatatccccgcttccataaacggtgtattccttttcgctatcggttacttttaaggaagcagtcctgggatagtagctgcgggtagcttcattctcattcatcctttccagcactatgggggaatcgcttttggtacggctcacatagacttcgttgccggtcgtcatcaccacataatccactccgtgattggacgcaaattgtccggacagtttgcttatccggtcgacgctctgctgaaatacatcaagattcaacgaattgacgacagccaactcttccgcaccgtcattggtgatataagacaaagcagtagtccgcttattgggattgatataatactcatgcgtcgtcttgtttatgtcgacgaatctgttcagtacctctgcgtcctgctcatagcttctgcttgcttgttcggaaggaacgttaaaatcatcttggcaaccttgaatggacagagccactaatgccattaacagaatatgtatacgtttcataattatgtattttgagagtgattcttctttatcgaacgtttaattctacttttgtatggtatcattagtctttaatgtttaactcgctacaaataaaatgcataaaaaaagaaaagaggttgtgtcaaaacgttggcacaaccttttttgatgatttaccgtcctgctatatttccttttggctacgccgcttttttctcattcatttggtaacaagttgctatattcccgttgtatcgcgttataaatagcccaataaatatagctttagcaagtgtaatgaactcctttccagcttttctcagttttgcacacatctttttgatattaaaagctatggcaaagaaggcaaagtccattgtcaccttgtcttctcccacatgccggaacctcctgtatgccatgttgtatttcatttgtccgaaaacagcttccggttctatacaccgcctgcccctatgcctgactccttcttctgagactaacctttcccgtgcctgccgtttatattggtttaaccggtggttgacttctataatacgatttccccgtgctttaaaacaacttccatgcaaaggacagccttcgcatctttgtgctttgtaccgggcactttcggtgatgtatccgctcgctgttttgtcacgtctggttcctatgcggttcatgtgttgccccatcggacaaacgtaataatcctcccccgcattgtaatggagactttccgcatggaacgggttgggagtataacggggacgctgctctttatggaagtagttgtacttgacaaaggcctctatcgcgttttcctgcatgaaccggtaattctcttccgagccgtaaccggagtctgccacaccgatacccggtaagcggttatagcggtgctggaaggagtggaagaaagggattagggtcagcgtatctgtagggttgggaaacagccggaagtctatgatgaattggttttcagtacctgtttgtaaattatacccgggcttggtctgcccgttcttcatggcgtcttctttcatacgcatgaatgtggcatcaggatcggtcttggaataggaattacgttctccaaggacttcaaggtgattgtcgtattccatcagcttgtcacgatacccttcaagttctctgacctgtttctttttttcacgcagagctttcttttgttccttgtcctgtgttgcaggctggtgttccagcacttctttgagttcatccactatattagagagcatggcgggagtcaactccacggatgtgtcttttacagagttctcctgcacaatggcttcatccacctgctccagaaggatgcgaatcttattcagcaaccttgtacggttcttttcgactgttttgcgccagacaaaagtatatttgttggccttggactcaatcttggtgccgtcgatatactctacgtcaagactgatgaaacccttgtcagctaggacaagaaccaactgcgtgaagacgttgtttatctcctcctttacacggttacggaaacggttgatggttatgaaatccggatgctcatgaccggcaagccagatataatggatatcacgcaaaagaagcttctctattttacggcaggaatagatattattcatgtaagcgtagataattaccttgagcatcattttaggatgataagcggaacgccccgcttctttataaagcttcttgaaattatcaaggttaagattatcaacaactgcattgacgatgcggacagggtcgtccgcagctatgttttcatcgattctttgtggaaaaagaacggtttggttgggaatgtaaggacgaaaatgtaactttgccataacgaaaaactttatgcctaaagttacaaaaattttgggtaataacaaagcccgggcttgggaaagtctgggctttgcgcataaaaaaaaggttgtgccagcattttgacacaacctccttcaaaataaagtgataatcctatgattttttaacaaaactctattcccttggtattctttcgtatatggctgattgtttcaggggtgacacggagaaaagaagctatctccctgagtgtgatataatttagaaaatccgggtagcgtcttactaaatccacatagagttcagtaggtgttttgcagtaaatatccagcaagcgcttataagtctggacaaagagttcttccgctaaaattttttccaattcctgagtagatttgtcggtggaaaagaagttggttatttcttgggcagatgcataatatatcagggaatcggtggttgcctgaatgcttactattgctttctccttttttatgcattgtgggtaatcaccgacatattctcctgcgaaagcatagcctacaatgtgttcacatccgttttcatccgtacagacatagcggaacatacctttctcgacataggcggcatgtgtcgtgacaatgccttgctccgcaaaatattcttttttcttcatttccttgcatcgtccatgatccaaaaagaattttttgaatatggagaattcttcacgctccgtatagttattaaagcctttcatgtgtgtagattagtttttgtcttattgatagcaaaaatacaaaagggagaataaaaagtatattatcggattaataaaaaagattatttaggcagaaggctttaattttatggtttatttatttttttaggtaattgtctgtctattgacgttaatgctaatattccttgcttatctctattaaatagtctacctttgtttaataaacagtggtgtttacatgtacatgttagtgatattgagatgtgcatgttgatactacttacatgtgcatgtcagtagtcctaacatatacatgtaggtatctgtattctttaaagaaagacggactgtttaataataaagcgttaactgttaatacatttgatatatggcaattccttacatagtctgccgcaaggtggatgcaacgaaaaaagaaaaaccgcaattgtggtatgccgtcggcaagaaaatgcagaagaaaagcggcagaacggagcgggacgtagcacatcgggtagctcaacggactggttttcacccgggagtggtagaagctgtcctggctgcaacgggtgaaatcattgaagaggagttgagcgacggacgctctgtgacgttgcgcggcatcgggtcgtttcagacggcagtcacgagcaaggggttcgaacatccggaagatgtgttgccacattccgtcagactctcacgcgtgtactttaaggcggatcgtatgctgacgctggccgtgaaacgtgcgggatgccatcggattccgtttaagtattacttcccgaaggaactgctgacgaagaagatggaactggctgataaacaggcggaacgggaagaggatgagatggatggagcggaatgcagctgaagagcggaatgagtaaattgtattttataaaaaacaaaatgaattatattttgtattttataaaatacaatttatctttgtaagaaataaatataaccttgatgcggatgaaacaattatttgctacttcatatcaactcatagaacgcacttcgacagaatttgtaagatatctgtataacgaaatacgttggggaaataggctgattgctataacaggcgcccgtggttcaggcaaaacaacgcttatgctccagtatatcaaagagcattacactgcatacagtaatgaagctctgtacgcttcattagataatatctggtttttcaggcactcgttgcttgagttggcagatgaattccacaaaatgggtggcaagacattgtttctggatgaagtgcataagtatccgacgtggtctgtagaaataaagaatatctatgatagctatccggatatgaaagttgtttttaccggttcttctctgttggaaattcataagggagaggctgatttatccaggcgagctgtcatttatcatctgcatggattgtcatttcgcgagtttttaatgtttgagtatgggcataaggtagaaacggttactttatccgatatattgacgagacatgtggaaatagcgatgaatgtgggaaaggtaatcaagccgcttgttgcattcaaagaatatttatcttatggatattatcctttttataaagaagataaggttttgtatcatgaaaaattattggcaacactgaatataattctggatgtggatttaccttctactgaaaagatagactattactctatcggaaagatgaaaaagttgtttgccatacttgctgaacttgtaccttacattcctaatgtatcggctttaagtaaagaactggaggttacgcggatttctttgctgaactatctgttttatcttcagaaagctcaaggtttattattacttgataaagaagcatccggtataaagcaattagctaagccggaaaagatttacttaggtaatacgaactatgcctatgcattgggaggtgataagactgatgttgggaatgtgagggaaacttttttcttcaaccagacccgggttctccatgctgtgacttactctcctaaggtcgattttattcttgatggaacttatagttttgagattggaggaaagaataaaacgaaggaacaattgagggaagtccccaatggatatttggcgcttgataatattgaagtgggatatggaaaccagataccgctttggatatttggattaatgtattgatagagtttgaacaataatagagaaaaataaatatgaagatatttcctactcaaagcatcaaagagttggatgcttacacaatagaaaatgaaccgattgcttccatcgacctgatggagcgtgcctcgcaggcattgacaaaagcgattatgaaacgctgggaggctgaaaccccgattacggtatttgccggaccgggcaataatggtggagatgcattggcagtctcccgattgctggcggaaaagggttaccaggtatcggtttatctgtttaatactaaaggagaactttctcccgattgcgaggcgaacaaggaacgactggcggatgtgaagaatgtggatttccatgaagtgacatcacaattcgtcccgcccgtgctgacggttgaccatgtggttatcgacggactgttcggtagtggcttgaacaagccgctaagtggtggctttgctgccgtggtgaagtatatcaatgcttcgtcggcacagatcgtggctattgatgttccttcgggattgatgggggaggagaataccttcaatatcaaagctaatattgtccgtgcggatgtgacgctgagtttgcaattgccgaagctggcttttctctttgctgagaatcaggaattcgtgggtgaatgggaattgctggatataggtctgagtgaagatgcgatagaggagatggcgactgattatagtctgctggaggctgaggatatgcaggatctgttgaaaccgagaaataagtttgcccataaaggagacttcggacgcgccttgcttattgccggttcgcaaggaatggcgggcgcgtcggtgcttgccgcaaaagcttgcttgcgctctggggtagggttgctgacgatgcatgtgccttattgtaacaatatgattgtgcagacttccgtgccggaggctatgacggaactggaccccagtgatacctgttttgcctgtcctacggatacggatgattatcaggcagtgggcatcggtccgggtctgggaaaggcggaagagacagagggtgcggtattggaacagatagacagctgtttatctcctatggtagtggatgctgatgctttgaatgtactggcagggcatcgcagttatatcggacgcttaccgaaagggagtattctgacaccgcatccgaaagaactggaacggttggtaggaaagtgtcaggactcttatgaacgcttaacgaaagcacgtgagttggcgcgaacatcaggaacatatatcatcttgaaaggtgcttactctgtggttattactccgcaagggaagtgttattttaatactacaggtaatccgggtatggcaacaggcggcagtggagatgttttgacgggtgtagtgctggctttgttggcacagggttatgcttcggaagatgcagcctgtctggcgatgtatgttcacgggcttgccggagatattgcttgtaagaagtatgggacgataggaatgacagccggggatatcgtgacgtgtctgccgttggcgtggaggatgatggaagaatgaaaagacaagatatcaagttttaagtatgcagtgttatggcgcagtcttaatactgcaatacttaaaacttaatacctaatttatcattttcctctcgtcgtaatatggaagcatccttgcttcaactcatactttatatagcatttatccgctttccgcaagtcgcgcaatacttcggagagaacgagtttcaatgtatctgaactgacatcctgtagcgggcgtccatcttcatcttctactttcttgaagcgcttccaactgacatcgaatgtagttccgtagaagtgcgcagagtttgccgaggcattgccattgcggcgacgcaggcgttttacgtcgtcttcggtgcggagtacggaggttacgattattttattggggtttagtcctttggcggtcagtgagtcaaggaaattggtaccgatggtatccagtagttgtgctgcacctttaatgagatatgggatggagtgtgtcagcgagtctactacatataaatcgttcgtttcgatgtgctgaagtttttccttcatgtgttcggcctctttgcgggaggcaattggcgtaatgcctatggcttgtgcgacattcagatgcgcttcattcaagtcgccgaaggttcgtctgtaactgattactcctttaatgtttcgcggctcattcagtttgagggacatatctttctttttgcatccggcaagggaagtgccggccataagtattgctaaaaataaaagcggaagtttgttgtatctttgttgcatatggcttgaaaatgtttttatgtgggcacaaaagtaggaaaaagaaaagagagttcttgtctatatactatcgttttttaaagaaaaaagtgacggctcaatctatttcacaaatagcgttctctttcattaaggtgaactcttctaaagaagatggggttatgtttatcattccggattttgattgtttgtgtaattttgctaatgtgaaatattcatcgtctaatacatcttgtattccccagatatcattttcttcatcttttatatatgactctatagctgtgccattcatataatgtacatagaagatcatatcttcgtgatgatcatagaaactaagataagtctctacggaatgaagatatttatcttctatacttctcagcaaatttcctataaacaagagctggggtttagatatgagtttgtcagcttcgcagcatatagaacagtcccaaatgtcattgaataaagattttttgcggaaccgtataacgtctttatgctccggatgctcagtgatgaatgattgtatctctttcgagattttgtgctgcacctctttatttggatcactttttaatatgaaatttatccggaataggctgtggcatttatttggcgatattgaaaactggtagttggctgctgaagtttgaagcttgaaattggtagatttatttttgagtgatgagtttattgaactattatcgcgattggcctttaaaagttcaaagatttgcctggtggtatcttctgctgattttctttttagaaaatcccaatacatgaatccagagagaattgatgcgcctacaatgagagaggctggtttaccaaagaatctttctgttaaaccgatactgcctcctgttatgagaacaaggattatccaaatggcagtattttttaataatcttgcagtttcacgttccatgtttgtattattcaagatttactttattatatgatagtaaattagtgacgaaggtacatatataaaataatggaagcaagatttgttgacgtattctttcatttcttttagggtttgcgttatctttgcgcccgaaaaatgaaagcaaaagagtatgcaacggtattttatttatttagcttatgacggaaccgcctaccacggctggcagatacaacccaatggagagagtgtacaagagtgtctgatgcgtgcacttgccacactgatgcgccgtgaagtagaggttattggtgccggacgtaccgatgccggggtgcatgcttctctgatggttgcccactttgatagtgacgaaccgcttgatacagctttctttaccgacaaactaaaccgccttttgccgcccgatatttctgtttaccgccttcgtgcagtgaagcccgatgcgcatgctcgttttgatgcaacggcacgcatgtataaatattacgtgactacgacaaagtctcccttcaatcgtcaataccgttgtcgtcttttccagacacccgatttcgaacgaatgaacgaagcggcccgtagtttgtttaattatacagacttcaccagtttcagcaaactgcatacggacgtaaaaacaaacaactgccgcatcatgcatgccgcctggactcagatagacgatgtaacctgggtattcaccattcaggcggaccgtttcctgcgcaatatggttcgtgcagttgtcggcactttgctcgaagtaggccgtggcaagctcaccgttgatggcttccggcgtgttatcgagcagaaagaccgttgcaaggctggtacttccgttccgggcaatgctctgtttctggtagatgtcacgtatccggaagaactgtttataagcagttaagcaggcggatcagtttcttaagtcggataactttatccctgaactgccttttaatttttaattttcaatttttaattcacatgtggttattactcgcctttctctcagctgccttgctgggtttttatgatgcatttaagaagaaatcattgcgcgataatgctgtgcttcccgttctgtttctgaatacggtattctccagcctgatatttcttcctttcatactgatttccgcttttactcctgctttgaacggaacaatgttcgaagtacctgttgtaggttgggaggtacataagtttatcattgtcaagtcatttatcgttctatcttcctggatattcggttactttggcatgaagcatttgccgttgacgattgtcggcccgattaatgctacccgccctgtaatggtgctggtgggtgccatgctgatattcggtgaacgtctgaacctgtatcaatggatcggagtcatgcttgccatactttctttctttatgctgagccgttccggtaagaaggaaggcattgactttaaacataacaaatggatttacttcatcgtgctggctgccatcaccggagctatcagcggactttatgacaagtatctcatgaagcaattcaatcctatggcggtgcagtcgtggtataatgtctatcaggtatttatcatgtgtcccatcattcttttgctatggtaccccaagcgaaaagaaagtacccctttccgttgggattggactatcatcctgatatccgtcttccttagtgcagctgactttgcctacttttatgccctgagctatgaagactccatgatttccattgtctctatggtacgtcgtgggagtgtggttgtctcattcctttttggagctctcttcttccgtgaaaagaatttaaaaagtaaggctgtcgatctcattttggtattgattggaatgttcttcctgtatttgggaagtaaatgagctctggaggtatttagaaagaaagagtgcttatttgtgaaataaatgctggtgctttctaaatattcgaaatatgttttgaatttcagaattttgtggttagctttgcgtcaaattgagtgtgaaatgagaataatatcatttgcggctataagagaatacgtcaagaagcatgctgacgctgatatacctttgcgtgattggtataaaaaggcagaacaagcagattggacatgtttgaccgatatgaagcaaacgtttaatagtgttgactatgtgggtaatgacaggtttgtttttaatatcaaaggtaatgattatcggttggttgcaatagtgttatttgccgctaaaaaggtctttattcgttttattggcactcataaagagtatgataataaagactgttccaaggcttaatactgcatattcgtgagacacacgtaaaactgtaaattgtatggcaaagataaaaacagagaaacagtacaaagcagcttgtatgagaattgaagagttgttgaaagttgttagcaatgagacgcctgctgatgatcagaattatcttgaactggatttgattgcggatttggttgccgactatgaagaggaacattttccagtgaaagctcccgctttggttgatgtgataaaattacgtatgtatgagatgggattaactcaaaataaactctctgagttgttgaatgttagtccttcacgcgttagtgaatatctttccggtaagtgtgaacctactttaaaagtggcacgagagatgagtcggaagttgggcattgatgctaatatcgttttaggtgtatagttgctattccctttattactataattgaatggcagaagatttatgtatcagcaacggcagcaaggccgaaaagtatcagactttgcttccccagataaagagcctgattgaaggcgaaaatgaccttatagccaatctggctaatgtttcggctgcactgaaagagactttcggtttcttttgggtgggattctatctggtgaaaggggaagaactgatattgggaccttttcagggaccgatagcctgcacacgtatccggaaaggacggggtgtttgcggtacggcatgggctaaggcggagacgttggtggtgcccgatgtagatgcattccccagacatatagcttgtagttcgctgtcgcgctcggagatcgttgttccgttgattcgtgaggatggcgaggtgtggggcgtgctcgatatagatagtgaaagcctgaatacctttgatgaaatagatgcacgttttcttggagagatatgctcctggctctgaagattgtgttgaagtaataaaatacaaaataggaataacagaaaaataatatgatgaagaaattgacaatgttcttgtgtttggcttgtgcctggatgtgttctctgcaagctcaggaagctaaaacctttttcaaaaatatgcccgatagcctcagtccactgcttactgccgtgaaccgtgccgactgtatcgacttccttgaaagtaagatgaaagcggaagtaaccaaccgtttcggcggcaaatcggaaatgacggagcttgctcccgactacatccgtatccagatgacaccgcaaagctcttggcaaatgaaactgctggctacgagcgacagcacaaaagtaatctgtgccgtatctacagcttgtgcccctgcttgtgatagtgatgtccatttctataccactggttgggaagaattgcctgcttcttctttcctcacgcctcctgtaatgaaagatttcctgtcattacccgatacggtgatggattatgaagtgagagatgccggcgaacaggcagatatgctgctgatgaaagccgatctttctgcaaaggacaatacactgacctttacttttacaactacggactatatggataaagaagcggcagagaaactgaaaccgtatctccgccgccctgtagtgtatgtttggaaagaaggtggctatgaccgcaagtaacgggctacttcacctttattctgtcgaacccttctccatatactccgattaccgcactttgtgatacaaatgcgtttggatctatatcctttatcaatcggaatataattgttgattcgcgcttcttggcaagtacgaacaacatcttctgttccttgccgctataaaatccggaagcattgatgacggtggcgccccggtgtggatatacattgatgtgccgggctatttcatcgtatttctcactgatgataaagaactgtacggattgccgggcactgttcactacctgatccagaacaaaactgcaaatgtacagggttacataaccgtaaaccaccttctcccaatctttcaacacaaaataactggaagaaatgataatcaggtcacagatcagcattacacgacctaatgtgatatcccggtatttattgatgatggcggcaatgatatccgttccgcctgtgctaccgttggaagaaaaggcgatgcctatgccgcctccgcagagggatgcaccgatgacgcatgccatgaaaggctgatcgtgcagtaagaccacaccgcttgccagtctctgaatgatggaaaggaagaatgtcagggtgaatacggcgaatacagttttgatactgaacttccagcccagaatgcggatggagagtagtaacaagatgaggttgatactgaaataagtgtactgcacagggaagccggtggcgaaatagactatggaggcgatacctggcactcctccggtggtgatgtcattgggcaacagaaatactgtccagcctataccataaagaattaatccgagggcgatcattaaataatctcttgtttcccgaatcaggctttgcttagtagggacgtttacgattgttttcatctgttttatacgtaagtttggtaatgagttttagaaactttctttataaaatatgcgttgtctgtttacgcctgcaaagatagatgtaatattcggaaatcttgtctaatccgtcatggttcatgaagggatgtgcccaattttttatttgctgattaaattcttatagactactgtttgcagtaattcctcccgtcgcagggctgaaacaggaagttctttcccgttgatgaagactcttcctttggcgatggaatcgatgtgcgagaggtttacaaggaaagatttgtgtattctgaagaaggcgctttgaggcagaatttcttccagtgaagtcatggtctgatggatgatgagagttttggacttgaagtgtagtttcaggtagttttgcataccttctacatacagtatatctttccaggatatctgggtaaatgcatccccctgcctgatatacatttcccgggtggttccttctattccattattttgcagtaagagttgggttctgaaggtatgggcggccttggtcactgcctgaaagaaacgctgaaaagaaattggtttcagtaagtagtcaacaacattaagttgatagccttccagggcatattcggagtaggcggtagttagtatggtcaacggtgcttcatccaatgatttcaggaaatcgataccggaaagatagggcatattgatatccagaaacatgaggtcgataggctggttttctaatattcctcttgcttcgagtgcagaagaacaggtagcgttgactgtgagaaaatccagtttgctgatgtggttggcaatgcctttgatggcgatttgttcatcgtctacgatgaggcatttcaggggctgttgttcaggggagtctttcatcttttatatttcaatgctaagtgaggtttgataataggtatctgtttggttgacggataactggtacttcttgtgaaacaggatgtccagtcgtttgactgtattggttaatcccagtccggtgcctggtcgttgcagatgcggggaactggtgttgccgacttcaagaaggatatgatgggcattctgtttgaaccgtatctgtacttgtcctttctccgtgggtgtgtgcgatgcatgtttaaaggcattttctatgaatgtcagtaataacaaaggcgggaatccgatgttgccgtcttctatttcccattcggtacttacggtcagtttgtcttcccagcgaatgttttctattgctatgtagttttgtaggaattctatctcctgttccaggctgataaactctttctgaccgttatacagctggtagcgcaggatatcggaatatttctctaaaagggaagaagctaaaggcacattatcctgcatcaggatgttgatgtgattcagcacattgaacatgaagtgaggggtgatttgctgccgtaatgtctggaagaggaattgagatttctctttttctaattgcaggttttctgaataaaagcacaggccgcagaaggcgagattgataaccaatgtacctggtagcaagaggatagagttgaaaagaaggttctcttctccctctatgaagatgttggatacaggaaatatacctgtttgttcaagatactggaagaggacgaagtaggaggctaccagtgtacttgtagggacgcaaagtactataaacaatatccagaaaggcttcatttgcttggtgcgtatcgcttttttcagcagatggttgcatagatattggttcaccagcatataactgccgcttatgcagatggtgagaagcgttgcttcgcatatactggtcgacatattgaggaattgtatccagaaagtgccggcaatgagtagccagaagatagtagagagctgccgcgatttgaaagtcagatgtttcttcatgttgcaaagataagggataaagtggttgctgcttatctgtttcgtcataagcaggctggggtttggtcaaaaagattttctcgttcgcattgatattgacaatctttgtggcatacaaatcattaaaagaagaaacaaaaatgaagtggatatctattgcaacagtcttattactactggtttctgtggaaagcacagcacaaatcactattaaaacagagtatttcggtacatcggcttatcgggatgaacacaatcagaaagtgggtaacagtaaaggttccgccatggtctatcacggaagtgccaatctgcctttgtcgatgaaaaagaacgaaaacaatcaacctacgatatggggtatcgggctttcgggcgattatgcgtctctgaataataagaatattgcagagcctcttgtgttgtccgagattctgaatttgcagatgtcgcttttccatgtgcggcctttgagtgagaagtggtcgatgatggcgattgtcggtgtcggcatgtatacggatgatacacggttttcgcatttacgtttccggaatgtattgggaagtgcggggttggtctttgtcaggcgtatactccctaatctggaactgggtgcgggtttggcattgaataatgctttcggttatcctatggcgtttcctgcattatatgtaaactggaattatgggcataagctgacttgcagcttttcggctttggatggagctaaccttgcggttgggtataatgtggacaaagcgttcagcatcagtttcattacggaaatgggtgggcagatggctttgacagagttgaatggtaat
